(19) United States
(12) Patent Application Publication
(10) Pub. No.: US 2021/0289802 A1
(43) Pub. Date: Sep. 23, 2021

(54) ENZYME PRODUCT WITH BETA-GALACTOSIDASE

(71) Applicant: WeissBioTech GmbH, Ascheberg (DE)

(72) Inventors: Christian NAUMER, Mannheim (DE); Christian ZUREK, Lorsch (DE); Ümit PUL, Duisburg (DE)

(73) Assignee: WeissBioTech GmbH, Ascheberg (DE)

(21) Appl. No.: 16/622,959

(22) PCT Filed: Jun. 15, 2018
(86) PCT No.: PCT/EP2018/065962

§ 371 Date: Dec. 16, 2019

(30) Foreign Application Priority Data
Jun. 16, 2017 (DE) 20 2017 103 594.8

(51) Int. Cl. A23C 9/12; C12N 9/38

(52) U.S. Cl. CPC A23C 9/1206; A23C 9/1216; C12Y 302/01023; C12Y 301/06001; C12N 9/2471

(57) ABSTRACT

The invention relates to an enzyme product comprising a beta-galactosidase product. The invention provides that the beta-galactosidase product has an inactive arylsulphatase.

### SEQUENCE LISTING STATEMENT

[0001] The ASCII file, entitled 79024_ST25.txt, was created on Jun. 9, 2021 and comprises 3,398,723 bytes.

### DESCRIPTION

[0002] The present invention relates to an enzyme product comprising a beta-galactosidase product according to independent claim 1 and an enzyme product obtainable by a neutral beta-galactosidase according to independent claim 6.

### State of the Art

[0003] The invention relates to the production of a lactase for the manufacture of lactose-free products which have neither a disturbing taste nor smell.

[0004] Enzymatic processes have been used for centuries in the production of food. One of the oldest of these enzymatic production processes is the production of cheese from milk, which would not be possible without the enzyme chymosin extracted from the stomachs of cattle calves. The enzyme chymosin, also called lab, is called coagulation enzyme.

[0005] Coagulation enzymes or coagulants have also been discovered in the stomachs of other mammals but also in microorganisms such as Rhizumucor mihei, Rhizomucor pussilus or Cryphonectria parasitica. In the meantime, coagulation enzymes from mammals are produced using microbial production strains such as fungi, e.g. Aspergillus oryzae, or yeasts, e.g. Kluyveromyces lactis (K. lactis).

[0006] Over the years, more and more enzymes have found use in the production of dairy products. Lysozyme from chicken eggs is used as an antimicrobial protection. Phospholipases improve the yield in cheese production as well as the taste of the cheese. Lipases of microbial origin are used to improve the taste of cheese. Enzymes are also used to produce lactobionic acid from lactose.

[0007] Lactases are particularly important additives for the milk processing industry. Lactases or beta-galactosidases (EC 3.2.1.108) are enzymes that break down lactose, a disaccharide, into its monosaccharides, glucose and galactose. Lactases are used both to produce certain dairy products, such as Dulce de Leche, and to remove lactose from milk.

[0008] Treatment with lactase can remove lactose from milk. The resulting lactose-free milk products can be consumed by lactose intolerant consumers without the unpleasant side effects.

[0009] Lactases are either used as a process aid in the manufacture of lactose-free dairy products or are taken by lactose intolerant consumers before consumption of a dairy product in tablet form or as a powder. In addition to being used for dietary reasons, lactase is also used to improve dairy products.

[0010] Depending on the type of application, there are lactases that are used in the neutral pH range for pure dairy products or lactases with an acidic activity range for the production of e.g. whey-based products.

[0011] All industrial lactases are of microbial origin. The neutral lactases are produced from yeasts such as Kluyveromyces lactis (K. lactis) or Kluyveromyces marxianus (K. marxianus), while the acid lactases are obtained from Aspergillus spec.

[0012] Some of the lactase products from yeasts have a side activity that can give the lactase-treated dairy product an unpleasant odor. This secondary activity is the activity of the enzyme arylsulphatase (EC 3.1.6.1), which cleaves cresol sulfate into cresol and sulfate. Cresol is the cause of the unpleasant smell.

[0013] In EP 1 954 808 B1 a lactase product containing a small amount of arylsulphatase is revealed.

### DISCLOSURE OF THE INVENTION

[0014] The object of the present invention is to overcome the above-mentioned disadvantages at least in part. In particular, the object of the present invention is to create lactase products that are pleasant to use.

[0015] The foregoing object is solved by an enzyme product having the characteristics of claim 1 and an enzyme product obtainable by a neutral beta-galactosidase having the characteristics of Claim 6.

[0016] Further characteristics and details of the invention result from the dependent claims, the description, the drawings as well as the mentioned examples. Characteristics and details which have been described in connection with the enzyme product in accordance with the invention shall, of course, also apply in connection with the enzyme product in accordance with the invention obtainable by a neutral beta-galactosidase as well as the use in accordance with the invention and the method in accordance with the invention and vice versa in each case, so that with regard to the disclosure of the individual aspects of the invention mutual reference is or can always be made.

[0017] An enzyme product according to the invention for the production of a beta-galactosidase product is characterized by the fact that the beta-galactosidase product contains an inactivated arylsulphatase. Arylsulphatase is an enzyme which occurs naturally in yeasts and is contained as a beta-galactosidase preparation by-product. The release of p-cresol in milk creates an unpleasant smell and taste. The inactivation can take place genetically. During genetic inactivation, special genes are regulated, in particular downregulated, so that gene expression is inactivated. In particular, the expression of a gene can be influenced or inactivated by manipulating the start of transcription or translation. The start of transcription, in particular at promoters, can be altered by genetic regulation of the specific DNA sequence and thus the expression of the entire gene can be activated, inhibited or inactivated. It is advantageous that an inactivated arylsulphatase does not produce any arylsulphatase at all, in particular no arylsulphatase gene is expressed at all, so that a disturbing odor and/or taste is not only reduced, but is not present at all.

[0018] Furthermore, in the context of the present invention, it is conceivable that the enzyme product according to the invention comprises a beta-galactosidase product containing a lactase of K. lactis. Not every enzyme product from yeasts of the genus Kluyveromyces contains arylsulphatase. By classical strain development or the selection of a suitable production strain it is possible to produce an arylsulphatase-free beta-galactosidase product. By combining classical genetic modifications or, as in this example, by “genome editing”, the production of arylsulphatase can be inhibited by specifically switching off the arylsulphatase gene in order to enable the production of an arylsulphatase-free beta-galactosidase product. With an arylsulfatase-free beta-galactosidase product, no unpleasant odor and/or taste resulting from the activity of the enzyme arylsulphatase can be produced in the milk. Furthermore, it is conceivable that the invention is directed at a K. lactis strain for the production of an enzyme product according to the invention, wherein the K. lactis strain has an inactivated, in particular genetically inactivated, arylsulphatase. It is advantageous that the method according to the invention can be performed in K. lactis.

[0019] Furthermore, it is possible within the scope of this invention that the gene for arylsulphatase is inactivated by means of genome editing methods using artificial nucleases (zinc finger nuclease, ZFN; Transcription Activator-Like Effector Nuclease, TALEN) or programmable nucleases of CRISPR technology, in particular CRISPR-Cas9. CRISPR technology is based on the components of widespread prokaryotic immune systems, which are summarized under the acronym CRISPR (clustered regularly interspaced short palindromic repeats). CRISPR cassettes are regions in the prokaryotic genomes that consist of an accumulation of short, often palindromic, DNA sequence repeats. The cas (CRISPR-associated) genes coding for Cas proteins with nucleic acid-binding, helicase and/or nuclease activities are located in the immediate vicinity of the CRISPR cassettes. The components of the prokaryotic CRISPR systems, in particular Class II systems, are used for genome editing. These include Cas proteins with nuclease activity, in particular Cas9, Cpf1 or other class II CRISPR nucleases, whose double-stranded DNA sequence specificities can be modulated with short CRISPR RNAs (crRNAs) or synthetic single-guide RNAs (sgRNAs). By using CRISPR technology, the arylsulphatase gene can be inactivated. Thus, this gene is no longer completely/sensitively readable, the arylsulphatase is not produced functionally and a corresponding smell/flavor can no longer be produced in milk products treated with beta-galactosidase.

[0020] Furthermore, it is conceivable within the scope of the present invention that the beta-galactosidase product contains a lactase from K. lactis 21B7, K. lactis 21B7ΔAS #1 and/or K. lactis 21B7ΔAS #9 (CBS deposit numbers: CBS 142344 for K. lactis 21B7, CBS 142345 for K. lactis 21B7ΔAS #1 and CBS 142346 for K. lactis 21B7ΔAS #9). For K. lactis 21B7 the strain K. lactis Y1118 (CBS 6315) is the precursor strain. For K. lactis 21B7ΔAS #1 and K. lactis 21B7ΔAS #9, K. lactis 21B7 is the precursor strain. Both strains K. lactis 21B7ΔAS #1 and K. lactis 21B7ΔAS #9 are preferably produced by the CRISPR/Cas method. All strains are deposited in the CBS strain collection and contain no foreign DNA or a new combination of genetic material. The strains comprising only the deletion of a single base pair (K. lactis 21B7ΔAS #9) or the deletion of 289 base pairs (K. lactis 21B7ΔAS #1) in the arylsulphatase gene.

[0021] According to another aspect of the invention, the enzyme product is available through a neutral beta-galactosidase from K. lactis to produce an arylsulphatase-free beta-galactosidase product. The use according to the invention has the same advantages as described in detail with regard to the composition according to the invention. As is the case here, inactivation can take place particularly at the genetic level. Specific genes can be regulated, in particular downregulated. Or in another form the gene is still expressed, but the gene product is formed in an inactive form. In both cases it prevents the formation of a disturbing smell and/or taste.

[0022] According to another aspect of the invention, the beta-galactosidase product is a product for the treatment of dairy products. Consequently, the present invention also covers foodstuffs, in particular milk products containing the enzyme product of the invention. It is advantageous that this can be milk, especially cow's milk, or milk from other livestock such as sheep or goats. Furthermore, the beta-galactosidase product may be used for the treatment of one of the following dairy products: Fresh milk, UHT milk, buttermilk, cream fraiche, soured milk, condensed milk, yoghurt, yoghurt product, cream, cream product, sour cream, mixed milk product, cream product, butter, milk powder, cheese, cheese product, curd, Dulce de Leche. Furthermore, the invention is aimed at cosmetic products as well as cleaning and/or care products with the invention enzyme product, which have the described advantages.

[0023] Furthermore, it is advantageous if the enzyme product according to the invention, the arylsulphatase-free beta-galactosidase product, is produced from production strains optimized by the application of artificial or programmable nucleases, in particular CRISPR technology. Advantageously, the CRISPR technology can be used to inactivate the arylsulphatase gene and thus the function of the gene product. Thus, this gene is no longer functional and a corresponding smell and/or taste can no longer be formed during the production of lactase products.

[0024] The invention-based enzyme product is obtainable in particular by a neutral lactase from Kluyveromyces lactis, for the production of a beta-galactosidase product. The beta-galactosidase product is essentially free of arylsulphatase activity. By essentially free it can be understood that the beta-galactosidase product has only minor to no arylsulphatase activity, so that the described benefits are achieved within the scope of the enzyme product comprising a beta-galactosidase product.

[0025] According to another aspect of the invention, the product of a neutral beta-galactosidase from K. lactis is used to produce an arylsulphatase-free beta-galactosidase product. The use according to the invention has the same advantages as described in detail with regard to the composition according to the invention.

[0026] According to a further aspect of the invention, a method for preparing a beta-galactosidase product is comprised, wherein the beta-galactosidase product contains an inactive arylsulphatase.

[0027] The method for preparing a beta-galactosidase product may advantageously comprise at least one of the following steps:
[0028] a) Determination of the target sequence of the gene to be inactivated in the production strain, preferably K. lactis 21B7,
[0029] b) Construction of a vector containing Cas9 and an sgRNA specific for the arylsulphatase gene of the beta-galactosidase-producing strain, preferably K. lactis 21B7,
[0030] c) Transformation of the beta-galactosidase-producing strain, preferably K. lactis 21B7,
[0031] d) Sequencing of the target sequence in the transformants to verify the successful deletion or introduction of individual nucleotides.
[0032] e) Removal of the vector from (b) knock-out mutants produced/confirmed by cultivation under non-selective conditions,
[0033] f) Permeabilization of the knock-out mutants by chemical treatment,
[0034] g) Separation of the permeate from the biomass,
[0035] h) Determination of the enzyme activities of beta-galactosidase and arylsulphatase in permeate (ratio arylsulphatase units/neutral lactase units, ASU/NLU).

[0036] The individual steps do not necessarily have to be performed in the specified order.

[0037] Molecular Biological Methods

[0038] The Escherichia coli strains (E. coli) DH5-alpha and DH10-beta serve as recipient organisms for the construction and propagation of CRISPR/Cas9 [pKmARS7] vector derivatives. The cultivation of produced E. coli strains takes place in Luria-Bertani medium (LB medium) containing 5 g/l yeast extract, 10 g/l tryptone, 5 g/l sodium chloride. For use as a solid medium, LB medium is mixed with 1.5% (w/v) agar. All media are heat sterilized before use. Where selective cultivation conditions are required, the media contain ampicillin at a final concentration of 100 μg/ml and kanamycin at a final concentration of 25 μg/ml.

[0039] The genesis of the beta-galactosidase producer K. lactis 21B7 is described in the work of Wellenbeck et al., Engineering in Life Sciences (2016), doi:10.1002/elsc.201600031. The strain is usually cultivated in complex Yeast Peptone Dextrose Medium (YPD Medium) containing 10 g/l yeast extract, 10 g/l peptone and 20 g/l glucose. For use as a solid medium, YPD medium is mixed with 2.0% (w/v) agar. All media are heat sterilized before use. Recombinant K. lactis 21B7 cells with introduced [pKmARS7] vector derivatives are cultured in YPD medium with the antibiotic geneticin (G418) at a final concentration of 25 μg/ml.

[0040] Commercially prepared chemically and electrically competent E. coli DH5-alpha or DH10-beta cells are purchased from New England Biolabs (NEB, Frankfurt) for transformation purposes and treated according to the manufacturer's specifications. Transformed E. coli cells are identified under selective conditions on LB-Agarmmedien.

[0041] Constructed [pKmARS7] vectors for targeting the genomic arylsulphatase gene sequence are introduced by electroporation into K. lactis 21B7 cells. The preparation of the electrocompetent cells and the implementation of the transformation are performed according to a published method by Sanchez et al., Applied and Environmental Microbiology 59 (1993), 2087-92. 10 ml YPD medium are inoculated with a single colony and incubated for 16 h at 30° C. on a horizontal shaker with a frequency of 250 rpm. Using cells from this culture, 100 ml of YPD medium are subsequently adjusted to an optical density of 0.2 at 600 nm (OD600). The inoculated culture shall be incubated on a horizontal shaker with a frequency of 250 rpm until an optical density OD600 of 0.8 to 1.4 at 30° C. is reached. After harvesting the culture by centrifugation for 5 min at 10° C. and 1900×g, the cell pellet obtained is converted into 10 ml pretreatment buffer [YPD medium containing 20 mM 4-(2-hydroxyethyl)-piperazine-1-ethanesulfonic acid, N-(2-hydroxyethyl)-piperazine-N′-2-ethanesulfonic acid (HEPES), pH 8.0; 25 mM 1,4-Dithioerythritol (DTT)] and incubated for 30 min at 30° C. on a horizontal shaker with a frequency of 100 rpm. Separate the pretreated cells from the suspension by centrifugation for 5 min at 10° C. and 1900×g and resuspend the obtained cell pellet in 10 ml electroporation buffer [10 mM Tris-HCl, pH 7.5; 270 mM sucrose; 1 mM lithium acetate]. After a further centrifugation step for 5 min at 10° C. and 1900×g, the pelletized cells are finally taken up in 300 μl electroporation buffer. Cell aliquots of 50 μl are stored at −80° C. For the transformation, 50 μl cells with 300 ng plasmid DNA are mixed in an electroporation cell with a slit width of 2 mm and stored on ice for 15 minutes. Electroporation is performed in a BioRad Gene Pulser Xcell electroporation system (BioRad, Munich) at 1.0 kV, 400Ω and 25 mF. Immediately after the pulse, the cells in the cuvette are first diluted in 1 ml ice-cold YPD medium, then transferred to a conical 15 ml tube and cultured for 4 hours at 30° C. on a horizontal shaker with a frequency of 250 rpm. Transformed K. lactis 21B7 cells with introduced [pKmARS7] vector derivatives are selected on geneticin-containing YPD agarmed medium for 2 to 5 days at 30° C.

[0042] The methods used for the isolation of plasmid DNA, the enzymatic modification of nucleic acids, the ligation of nucleic acids, the enzymatic amplification of nucleic acids by polymerase chain reaction (PCR) and the electrophoretic separation and purification of nucleic acids in agarose gels are state-of-the-art. Unless otherwise noted, the methods are performed according to the protocols described in the standard work of Sambrook et al. Molecular Cloning, A Laboratory Manual, 2nd edition 1989, CHS Press, Cold Spring Harbor.

[0043] The GeneJET Plasmid Miniprep Kit (Thermo Fisher Scientific, Darmstadt) is used for the isolation of plasmid DNA from recombinant E. coli cells according to manufacturer specifications. The amplification of nucleic acids by PCR is preferably performed with the Phusion Flash High-Fidelity PCR System (Thermo Fisher Scientific, Darmstadt). All oligonucleotides used were synthesised by the service provider biomers.net (biomers.net, Ulm). If necessary, nucleic acids from enzymatically catalyzed reactions and agarose gels are purified with the Qiagen MinElute System (Qiagen, Hilden) or the ZymoClean Gel DNA Recovery System (Zymo Research, Freiburg) according to manufacturer protocols. The identity of generated PCR amplicons and cloned nucleic acids will be determined by Sanger sequencing at the service provider GATC Biotech (GATC Biotech, Constance).

[0044] The isolation of genomic DNA from the strain K. lactis 21B7 is carried out from 2 OD cells (OD600) of an overnight culture with the Zymo Research YeaStar Genomic DNA System (Zymo Research, Freiburg). Degradation of the cell wall with the enzyme zymolyase is performed for 1 h at 37° C. and the purified genomic DNA is eluted into 60 μl Qiagen EB buffer (Qiagen, Hilden).

[0045] Analysis of the Target Sequence in K. lactis 21B7

[0046] The genome sequence of the strain K. lactis NRRL Y-1140 available under the access number NC_006042 (Seq ID NO: 20) in the NCBI database (www.ncbi.nlm.nih.gov/nucleotide/) serves as a reference for amplification and sequence analysis of the arylsulphatase gene in K. lactis 21B7. In the genome of the strain K. lactis NRRL Y-1140 the annotated open reading frame KLLA0_F03146g and a size of 1668 bp (Seq ID NO: 21) encodes a conserved hypothetical protein with 555 amino acids (Seq ID NO: 22). The Kyoto Encyclopedia of Genes and Genomes database (KEGG, http://www.genome.jp) assigns the protein the function of an arylsulphatase (KLLA0F03146g) based on sequence homology. The experimental proof for the arylsulphatase activity of the protein can be shown in the work of Stressler et al., Applied Microbiology and Biotechnology, 100 (2016), 5401-5414. The derived primers ATM358 (5′-TTCGCTCCACCCGATCATGAGAGTTTACAG-3′ Seq ID NO: 01) and ATM359 (5′-TGTAATGGCCAATGTGGAGCTGTGTAGGTC-3′ Seq ID NO: 02) generate in a PCR reaction with genomic DNA from K. lactis 21B7 is a specific amplicon having a size of 894 bp (PCR conditions: 30 ng genomic DNA, 12.5 pmol primer; 25 μl reaction volume; initial denaturation, 98° C., 10 sec; PCR cycle: 35×[98° C., 5 sec; 60° C. 5 sec; 72° C., 14 sec], 72° C., 60 sec). The amplicon generated is composed of 238 bp of the 5′-UTR and 656 bp of the coding arylsulphatase gene sequence. To determine the nucleotide sequence, the blunt end PCR products are cloned into the Thermo Fisher Scientific pCR blunt vector system (Thermo Fisher Scientific, Darmstadt) according to the manufacturer's protocol and the ligation products are transformed into competent E. coli cells. Plasmid DNA is isolated from recombinant E. coli cells and the sequence of the inserted amplicons is determined by Sanger sequencing with the primers M13f (5′-TGTAAAACGACGGCCAGT-3′ Seq ID NO: 03) and M13r (5′-CAGGAAACAGCTATGACC-3′ Seq ID NO: 04) flanking the cloning site. The nucleotide sequence determined for the 894 bp amplicon is shown in sequence 1. Compared to the reference sequence from K. lactis NRRL Y-1140, a base difference in the coding arylsulphatase gene sequence can be observed for the corresponding genome segment in K. lactis 21B7. The change of the triplet from CGT to AGT in the nucleic acid sequence (sequence 1) leads to the exchange of the amino acid arginine for serine in the primary sequence at position 139 of the protein (sequence 2). According to the publication of Stressler et al., Applied Microbiology and Biotechnology, 100 (2016), 9053-9067, the protein with the amino acid serine in position 139 represents the active arylsulphatase variant. The sequence information obtained serves as a reference for the inactivation of the arylsulphatase gene in K. lactis 21B7 by CRISPR/Cas9.

[0047] Sequence 1 comprises an 894 bp amplicon (primer pair ATM358/ATM359) with the partial arylsulphatase sequence from K. lactis 21B7 (in brackets: open reading frame, ORF):

Seq ID NO: 05
TTCGCTCCACCCGATCATGAGAGTTTACAGAAAGTTCTTACCTTGAAACTT
TTTTACTGCACCCTTTTTATCACTTCGAGTAAAGCTTTAAATGACATAATT
TACAATATAAATATGGATCATCTCACCTGTCATCATGGTCTTTTAGGAATT
GTGAAGGTATACTAACCAATTGTTACTCTATGATCTATCCGAAAATCCGCA
AACTGCATTAGAGAAAAGTACAATCGAATTGCA[ATGACCAAAACAGATGA
ACCTAAAAAGCCGAATTTCTTAATTATTGTCGCCGATGATTTAGGGTTTAC
AGATGTGTCGAGTTTTGGAGGTGAAATACAAACGCCAAACCTTGATAAATT
GTCTAAAGGTGGTTTCAGATTCACTGGTTTTCATACTGCATCGGCATGTTC
GCCAACTAGATCGATGTTGTTGAGCGGTACTGACAACCATTTGGCAGGTTT
GGGCCAAATGGCTGAATATGCCAGGCAATTTCCAGAAAAGTTCAAGGATAA
ACCTGGTTATGAAGGTTATTTGAACTATAAGGTTGCTGCATTGCCTGAAAT
ATTATCCCCAGAATATTACACGCTGATTTCGGGGAAATGGCACCTTGGATT
AGAAAAGCCATATTGGCCAAGTGACCGTGGATTCCAAAAAAGTTTTACCTT
GCTGCCTGGTGCAGGAAACCATTTCAAATGCAATTTGGATAGCAAGTTTCT
TCTCCCATGGATTTATCAGGAAAATGGCGAAAGGGTAGACCATAACAAGTT
TCCAGAAAACTTTTATTCCACCACTTACTTCACAGATAAATTTTTGGAATA
TTTGAAGGATGATGAAGAAAGAAAAGGTCGCCCATTCTTTGGCCAGTTGAC
CTACACAGCTCCACATTGGCCATTACA].

[0048] Sequence 2 comprises a translated protein partial sequence of arylsulphatase from K. lactis 21B7:

Seq ID NO: 06
MTKTDEPKKPNFLIIVADDLGFTDVSSFGGEIQTPNLDKLSKGGFRFTGFH
TASACSPTRSLLSGTDNHLAGLGQMAEYARQFPEKFKDKPGYEGYLNYKVA
ALPEILSPEYYTLISGKWHLGLEKPYWPSDRGFQK[S]FTLLPGAGNHFKC
NLDSKFLLPWIYQENGERVDHNKFPENFYSTTYFTDKFLEYLKDDEERKGR
PFFGQLTYTAPHWPL

[0049] Construction of the [pKmARS7] Base Vector

[0050] The base vector used with a size of 3924 bp contains at least one of the following elements: ARS7 replicon, TEF1p promoter, EM7p promoter, CYC1t transcription terminator, kanMX resistance gene, ColE1 replicon, CPS1t transcription terminator. The element ARS7 is an autonomously replicating DNA sequence ARS7 from K. marxianus DSM70344 (Autonomously Replicating Sequence, KmARS7) for the episomal propagation of the vector in K. lactis 21B7. The element TEF1p promoter is a promoter of the Transcription Elongation Factor 1 gene from Saccharomyces cerevisiae (S. cerevisiae) for the expression of the kanamycin resistance gene in K. lactis 21B7. The element EM7p promoter is a synthetic prokaryotic promoter for the expression of the kanamycin resistance gene in E. coli. The element CYC1t transcription terminator is a 3′ region to the CYC1 gene from S. cerevisiae for terminating the transcription of the kanMX resistance gene. The element kanMX resistance gene is a kanamycin resistance gene. The element ColE1 replicon is used for episomal replication of the vector in E. coli. The element CPS1t transcription terminator is a 3′ region to the CPS1 gene from S. cerevisiae for the termination of inserted genes in the flanking cloning site.

[0051] Genome Editing

[0052] The application of CRISPR/Cas9 technology for the genome editing of selected genes in K. lactis is exemplarily shown in the work of Horwitz et al., Cell Systems 1 (2015), 88-96. The expression of the human codon-optimized Cas9 nuclease and the transcription of base-specific single-guide RNA (sgRNA) enables the precise introduction of DNA double-strand breaks in K. lactis ATCC 8585 and subsequently the inactivation or alteration of target genes via the cell's own repair mechanism via non-homologous end joining (NHEJ). For the introduction of knock-out mutations into the gnomically encoded arylsulphatase gene in K. lactis 21B7, a CRISPR/Cas9 system was established based on the present E. coli/K. marxianus shuttle vector [pKmARS7]-MCS2-CPS1T-kanMX.

[0053] A SNR52 transcription cassette was inserted into the base vector [pKmARS7] (see above) with the hCas9 expression cassette ([pKmARS7]-TPI1p-hCas9-CPS1t-kanMX) to generate the chimeric sgRNA consisting of the crRNA and tracrRNA sequences. The principle structure of sgRNA corresponds to the construction published in the work of Jinek et al., Science 337 (2012), 816-821. The 426 bp DNA fragment comprising downstream of the SNR52 RNA polymerase III promoter (DiCarlo et al., Nucleic Acids Res 41 (2013), 4336-4343), a BsmBI cloning site for the modulation of the first 20 nucleotides (target specific guide sequence) of sgRNA by Golden Gate assembly (Engler and Marillonnet, Methods Mol Biol (2014), 119-131). For cloning purposes, the recognition sequences of the restriction endonucleases AgeI and SbfI flank the SNR52-sgRNA transcription unit. After AgeI/SbfI hydrolysis, the 423 bp cassette was inserted into the 8703 bp XmaI/SbfI [pKmARS7]-TPI1p-hCas9-CPS1t-kanMX vector fragment. Subsequently, the recognition sequences of the restriction endonuclease BsmBI in the coding hCas9 and kanMX gene sequences were removed in the generated vector by introducing synonymous triplets. The modification of these sequences allows the direct introduction of target specific guide sequences into the BsmBI hydrolyzed vector [pKmARS7]-TP11p-hCas9-SNR52p-sg RNA.

[0054] Further measures to improve the invention result from the following description of some embodiments of the invention. All characteristics and/or advantages resulting from the claims or the description, including all details, possible uses and method steps, may be essential to the invention, both in themselves and in various combinations. It should be noted that the examples are only descriptive and are not intended to restrict the invention in any way.

### Example 1: Inactivation of Arylsulphatase in K. lactis 21B7 by CRISPR/Cas9

[0055] The nucleotide sequence of arylsulphatase in the genome of strain K. lactis 21B7 (see sequence 1) serves as a reference for the identification of potential Cas9 target sequences in the coding gene sequence of the enzyme. The base sequence “N₍₂₀₎NGG” Seq ID NO: 07 (Deltcheva et al., Nature 471 (2011), 602-607) is regarded as a suitable target sequence for the activity of the SpCas9 nuclease. The canonical “NGG” sequence motif is referred to as “Protospacer adjacent motif (PAM)” and immediately follows the 20-base target sequence (Protospacer). The activity of the Cas9-sgRNA complex leads to a DNA double strand break at a defined position located three base pairs upstream of the PAM within the protospacer.

[0056] For the genetic inactivation of arylsulphatase in K. lactis 21B7, the following three CRISPR/Cas9 target sequences with the base sequence “N₍₂₀₎NGG” Seq ID NO: 07 in the corresponding coding gene sequence are identified as examples. The PAM motifs are shown bold in the sequences.

[0057] Protospacer PAM Target Sequence No. 1:

[0058] Bases 266 to 288 in sequence 1, non-codogenic DNA strand,

Seq ID NO: 08
5′-GCGACAATAATTAAGAAATTCGG-3′

[0059] Protospacer PAM Target Sequence No. 2:

[0060] Bases 344 to 366 in sequence 1, codogenic DNA strand

Seq ID NO: 09
5′-AACCTTGATAAATTGTCTAAAGG-3′

[0061] Protospacer PAM Target Sequence No. 3:

[0062] Bases 430 to 452 in reference sequence No. 1, codogenic DNA strand,

Seq ID NO: 10
5′-GAGCGGTACTGACAACCATTTGG-3′

[0063] The molecular biological procedure for the genetic inactivation of arylsulphatase in the genome of strain K. lactis 21B7 is illustrated below using the identified Protospacer-PAM target sequence No. 1 as an example: The complementary oligonucleotides ATM381_Sp1AS_f (5′-GATCGCGACAATAATTAAGAAATT-3′ Seq ID NO: 11) and ATM382_Sp1AS_r (5′-AAACAATTTCTTAATTATTGTCGC-3′ Seq ID NO: 12) are inserted to the BsmBI-hydrolyzed CRISPR/Cas9 vector [pKmARS7]-TPI1p-hCas9-SNR52p-sgRNA by Golden Gate assembly and the ligation products into competent E. coli cells. The identity of the inserted oligonucleotides was confirmed in isolated plasmid DNA by Sanger sequencing. The generated construct [pKmARS7]-TPI1p-hCas9-SNR52p-Sp1ASsgRNA is introduced by electroporation into competent K. lactis 21B7 cells and transformants on YPD-agarmedium with geneticin (G418) are selected. The genomic DNA of selected recombinant clones serves as a PCR template for the detection of potential IndeI mutations (insertion/deletion) in the selected CRISPR/Cas9 target sequence. For this purpose, the primers ATM358 (5′-TTCGCTGCCACCCGATCATGAGTTTTACAG-3′ Seq ID NO: 01) and ATM359 (5′-TGTAATGCCAATGTGGTGAGCTGTAGGTAGGTC-3 Seq ID NO: 02 ‘) are used to generate a specific PCR-product and determining the nucleotide sequence of the amplicon in the region of the CRISPR/Cas9 targeting site with the primer ATM397 (5’-TGGAATCCACGGTCACTTGG-3′ Seq ID NO: 13) by Sanger sequencing. Sequence analysis leads to the detection of a base pair deletion in the area of the selected protospacer sequence for the majority of the clones investigated. The generated frameshift in position 33 of the coding arylsulphatase gene sequence causes the premature termination of the reading frame. The genetic inactivation of the target gene by CRISPR/Cas9 is shown in sequence 3 for the clone #9 K. lactis 21B7 Sp1AS #9. Sequence 4 shows the resulting ORF and the corresponding protein sequence of arylsulphatase.

[0064] Sequence 3 comprises a deletion mutant K. lactis 21B7 Sp1AS #9 (partial sequence of the coding arylsulphatase gene). The deleted nucleotide is shown in brackets:

Seq ID NO: 14
ATGACCAAAACAGATGAACCTAAAAAGCCGAA[T]TTCTTAATTATTGTCG
CCGATGATTTGGGTTTACAGATGTGTCGAGTTTTGGAGGTGAAATACAAAC
GCCAAACCTTGATAAATTGTCTAAAGGTGGTTTCAGATTCACTGGTTTTCA
TACTGCATCGGCATGTTCGCCAACTAGATCGATGTTGTTGAGCGGTACTGA
CAACCATTTGGCAGGTTTGGGCCAAATGGCTGAATATGCCAGGCAATTTCC
AGAAAAGTTCAAGGATAAACCTGGTTATGAAGGTTATTTGAACTATAAGGT
TGCTGCATTGCCTGAAATATTATCCCCAGAATATTACACGCTGATTTCGGG
GAAATGGCACCTTGGATTAGAAAAGCCATATTGGCCAAGTGACCGTGGATT
CCA.

[0065] Sequence 4 comprises a resulting ORF of 39 bp and the associated protein sequence of arylsulphatase in clone K. lactis 21B7 Sp1AS #9: ATG ACC AAA ACA GAT GAA CCT AAA AAG CCG AAT TCT TAA Seq ID NO: 15 (translated protein sequence: MTKTDEPKKPNS Seq ID NO: 16).

[0066] In the analyzed clone #1 K. lactis 21B7 Sp1AS #1 the deletion of 289 bp in the arylsulphatase gene can be detected as a consequence of the Cas9-sgRNA activity with protospacer No. 1. The deleted area is shown in sequence 5. Sequence 6 shows the resulting ORF and the corresponding protein sequence of arylsulphatase for the deletion mutant K. lactis 21B7 Sp1AS #1.

[0067] Sequence 5 comprises a deletion mutant K. lactis 21B7 Sp1AS #1 (N-terminal partial sequence of the coding arylsulphatase gene, the region in brackets corresponds to the deletion region of strain CBS 142345):

Seq ID NO: 17
ATGACCAAAACAGATGAACCTAAAAAGCCGAAT[TTCTTAATTATTGTCGC
CGATGATTTAGGGTTTACAGATGTGTCGAGTTTTGGAGGTGAAATACAAAC
GCCAAACCTTGATAAATGTCTAAAGGTGGTTTCAGATTCACTGGTTTTCAT
ACTGCATCGGCATGTTCGCCAACTAGATCGATGTTGTTGAGCGGTACTGAC
AACCATTTGGCAGGTTTGGGCCAAATGGCTGAATATGCCAGGCAATTTCCA
GAAAAGTTCAAGGATAAACCTGGTTATGAAGGTTATTTGAACTATAAGGTT
GCTGCATTGCCTGAAA]TATTATCCCCAGAATATTACACGCTGATTTCGGG
GAAATGGCACCTTGGATTAGAAAAGCCATATTGGCCAAGTGACCGTGGATT
CCA.

[0068] Sequence 6 comprises a resulting ORF with 60 nucleotides and associated protein sequence of arylsulphatase in clone K. lactis 21B7 Sp1AS #1: ATGACCAAAACAGATGAACCTAAAAAGCCGAATTATTATCCCCAGAATATTACACGCTGA Seq ID NO: 18, translated protein sequence: MTKTDEPKKPNYYPQNITR Seq ID NO: 19.

[0069] The CRISPR/Cas9 [pKmARS7] vector derivatives used are removed from the characterized K. lactis 21B7 arylsulphatase knock-out mutants by multiple cultivation passages in YPD medium without antibiotic addition.

### Example 2: Expression of Lactase and Arylsulphatase in K. lactis 21B7 and Production of K. lactis Biomass

[0070] Biomass of the K. lactis strain 21B7 (CBS 142344) and the deletion mutants CBS 142345 and CBS 142346 with intracellular lactase is increased by fermentation. This can be achieved by cultivation for 72 hours in a mineral salt medium suitable for yeasts and feeding a substrate feed using state-of-the-art fermentation methods. Examples of this are documented in numerous publications (Wellenbeck et al., Engineering in Life Sciences (2016); Inchaurrondo et al., Process Biochemistry (1994); Fonseca et al., Applied Microbiology and Biotechnology (2013)).

[0071] The produced biomass contains the intracellular target enzyme lactase. In order to enrich this, the biomass is first broken down. The cell disruption methods described by Fenton et al. (1980) are used for this purpose, in which lactase is released into the aqueous phase by contact of the cells with an alkyl alcohol or a dialkyl alcohol. Afterwards the cells are separated by filtration and the enzyme is concentrated by ultrafiltration at a cut-off of 50 kDa to an activity of about 7500 NLU (Neutral Lactase Units)/g and purified by diafiltration with a phosphate buffer. The lactase preparation is then stabilized by the addition of glycerol corresponding to 25% of the total volume.

[0072] The amount of lactase contained in the preparations is measured in Neutral Lactase Units (NLU) of enzyme activity. One NLU corresponds to the conversion of 1.3 μmol substrate per minute under the conditions of the assay. In the assay used, the synthetic substrate ortho-nitrophenol-beta-D-galactopyranoside (ONPG) is hydrolytically cleaved from the lactase and the products ortho-nitrophenol (ONP) and galactose are formed. The reaction takes place over a period of 15 min at 30° C. in a 100 mM potassium phosphate buffer at pH 6.5 with 1 mM magnesium sulphate and 0.05 mM EDTA. The amount of substrate converted can be calculated from the absorption of the product ONP at 420 nm by calibration with different concentrations of ONP solutions.

[0073] The amount of arylsulphatase contained in the preparations is measured in arylsulphatase units (ASU) of enzyme activity. The activity is measured with the substrate paranitrophenylsulfate according to the measurement method according to De Swaaf et al., European Patent Application, EP2439266A2 (2012). An ASU is defined as the change in OD at 410 nm (OD410)*10E6 per hour under the conditions of the assay.

[0074] Further measures to improve the invention result from the figure shown. All features and/or advantages resulting from the claims, the description or the drawings, including design details, spatial arrangements and method steps, may be essential to the invention both in themselves and in various combinations. It should be noted that the figure is only descriptive and is not intended to restrict the invention in any way. It shows

[0075] FIG. 1: Results of the quantification of the arylsulphatase activity in the lactase preparations of the investigated strains of K. lactis

[0076] FIG. 1 shows the arylsulphatase activity as a function of lactase activity (ASU per NLU). In the lactase preparation, which is produced from fermentation with the strain K. lactis 21B7, the average arylsulphatase activity is 590 ASU per NLU, with a commercially available reference enzyme 55 ASU/NLU. For the deletion mutants K. lactis 21B7 Sp1AS #1 and K. lactis 21B7 Sp1AS #9 the average arylsulphatase activity is only 0 to 6 ASU per NLU. The measured values for the mutants are close to the detection limit of the assay used. Thus, the inactivation of the coding arylsulphatase gene results in a strong reduction of the activity of the arylsulphatase in the purified lactase preparation in both investigated deletion mutants or even in an activity below the detection limit of the used assay.

1. An enzyme product comprising a beta-galactosidase product
wherein
the beta-galactosidase product comprises an inactive aryl sulfatase.

2. The enzyme product according to claim 1,
wherein
the beta-galactosidase product contains a lactase from Kluyveromyces lactis.

3. The enzyme product according to claim 1,
wherein
the beta-galactosidase product comprises a lactase from Kluyveromyces lactis 21B7.

4. The enzyme product according to claim 1,
wherein
a gene for the arylsulphatase can be inactivated by means of genome editing methods using at least artificial nucleases or programmable nucleases of the CRISPR technology.

5. The enzyme product according to claim 1
wherein
the arylsulphatase is inactivated at the genome level by genome editing methods.

6. An enzyme product obtainable by a lactase from Kluyveromyces lactis, for the preparation of a beta-galactosidase product which is substantially free of arylsulfatase activity.

7. The enzyme product according to claim 6,
wherein
the essentially arylsulphatase-free beta-galactosidase product has been produced from a production organism modified by means of genome editing technologies.

8. The enzyme product according to claim 3,
wherein
the lactase is from at least one of the deposited strains CBS142344, CBS142345 and CBS142346.

9. The enzyme product according to claim 4,
wherein
at least a zinc finger nuclease or transcription activator-like effector nuclease is used.

10. The enzyme product according to claim 5,
wherein
the arylsulphatase is inactivated by the application of the CRISPR technology with class II cas endonucleases.

11. The enzyme product according to claim 10,
wherein
the class II cas endonuclease is cas9 or cpf1.

12. An enzyme product according to claim 6,
wherein the lactase is a neutral lactase.

13. The enzyme product according to claim 7,
wherein
the genome editing technology is CRISPR-Cas9 technology.

The application's sequence listing, which the Patent Office published only in electronic form, follows.

SEQUENCE LISTING (22 sequences)

SEQ ID NO: 1 - DNA, 30 bp, Artificial sequence
  Single strand DNA oligonucleotide
ttcgctccacccgatcatgagagtttacag

SEQ ID NO: 2 - DNA, 30 bp, Artificial sequence
  Single strand DNA oligonucleotide
tgtaatggccaatgtggagctgtgtaggtc

SEQ ID NO: 3 - DNA, 18 bp, Artificial sequence
  Single strand DNA oligonucleotide
tgtaaaacgacggccagt

SEQ ID NO: 4 - DNA, 18 bp, Artificial sequence
  Single strand DNA oligonucleotide
caggaaacagctatgacc

SEQ ID NO: 5 - DNA, 893 bp, Artificial sequence
  an 894 bp amplicon (primer pair ATM358/ATM359) with the partial arylsulphatase sequence from K. lactis 21B7
ttcgctccacccgatcatgagagtttacagaaagttcttaccttgaaacttttttactgcaccctttttatcacttcgagtaaagctttaaatgacataatttacaatataaatatggatcatctcacctgtcatcatggtcttttaggaattgtgaaggtatactaaccaattgttactctatgatctatccgaaaatccgcaaactgcattagagaaaagtacaatcgaattgcaatgaccaaaacagatgaacctaaaaagccgaatttcttaattattgtcgccgatgatttagggtttacagatgtgtcgagttttggaggtgaaatacaaacgccaaaccttgataaattgtctaaaggtggtttcagattcactggttttcatactgcatcggcatgttcgccaactagatcgatgttgttgagcggtactgacaaccatttggcaggtttgggccaaatggctgaatatgccaggcaatttccagaaaagttcaaggataaacctggttatgaaggttatttgaactataaggttgctgcattgcctgaaatattatccccagaatattacacgctgatttcggggaaatggcaccttggattagaaaagccatattggccaagtgaccgtggattccaaaaaagttttaccttgctgcctggtgcaggaaaccatttcaaatgcaatttggatagcaagtttcttctcccatggatttatcaggaaaatggcgaaagggtagaccataacaagtttccagaaaacttttattccaccacttacttcacagataaatttttggaatatttgaaggatgatgaagaaagaaaaggtcgcccattctttggccagttgacctacacagctccacattggccattaca

SEQ ID NO: 6 - protein, 217 aa, Artificial sequence
  a translated protein partial sequence of arylsulphatase from K. lactis 21B7
MTKTDEPKKPNFLIIVADDLGFTDVSSFGGEIQTPNLDKLSKGGFRFTGFHTASACSPTRSLLSGTDNHLAGLGQMAEYARQFPEKFKDKPGYEGYLNYKVAALPEILSPEYYTLISGKWHLGLEKPYWPSDRGFQKSFTLLPGAGNHFKCNLDSKFLLPWIYQENGERVDHNKFPENFYSTTYFTDKFLEYLKDDEERKGRPFFGQLTYTAPHWPL

SEQ ID NO: 7 - DNA, 23 bp, Artificial sequence
  "N(20)NGG"  - canonical "NGG" sequence motif  of SpCas9 nuclease (following a 20 base target sequence)
  misc_feature (1)..(21): n is a, c, g, or t
nnnnnnnnnnnnnnnnnnnnngg

SEQ ID NO: 8 - DNA, 23 bp, Artificial sequence
  Protospacer PAM target sequence No. 1
gcgacaataattaagaaattcgg

SEQ ID NO: 9 - DNA, 23 bp, Artificial sequence
  Protospacer PAM target sequence No. 2
aaccttgataaattgtctaaagg

SEQ ID NO: 10 - DNA, 23 bp, Artificial sequence
  Protospacer PAM target sequence No. 3
gagcggtactgacaaccatttgg

SEQ ID NO: 11 - DNA, 24 bp, Artificial sequence
  Single strand DNA oligonucleotide
gatcgcgacaataattaagaaatt

SEQ ID NO: 12 - DNA, 24 bp, Artificial sequence
  Single strand DNA oligonucleotide
aaacaatttcttaattattgtcgc

SEQ ID NO: 13 - DNA, 20 bp, Artificial sequence
  Single strand DNA oligonucleotide
tggaatccacggtcacttgg

SEQ ID NO: 14 - DNA, 409 bp, Artificial sequence
  deletion mutant K. lactis 21B7 Sp1AS#9
  mutation (33)..(33): deleted in the deletion mutant K. lactis 21B7 Sp1AS#9
atgaccaaaacagatgaacctaaaaagccgaatttcttaattattgtcgccgatgatttgggtttacagatgtgtcgagttttggaggtgaaatacaaacgccaaaccttgataaattgtctaaaggtggtttcagattcactggttttcatactgcatcggcatgttcgccaactagatcgatgttgttgagcggtactgacaaccatttggcaggtttgggccaaatggctgaatatgccaggcaatttccagaaaagttcaaggataaacctggttatgaaggttatttgaactataaggttgctgcattgcctgaaatattatccccagaatattacacgctgatttcggggaaatggcaccttggattagaaaagccatattggccaagtgaccgtggattcca

SEQ ID NO: 15 - DNA, 39 bp, Artificial sequence
  partial nucleic acid sequence of arylsulphatase
atgaccaaaacagatgaacctaaaaagccgaattcttaa

SEQ ID NO: 16 - protein, 12 aa, Artificial sequence
  amino acid sequence of Seq ID 15
MTKTDEPKKPNS

SEQ ID NO: 17 - DNA, 409 bp, Artificial sequence
  N-terminal partial sequence of the arylsulphatase gene
  mutation (34)..(317): deletion region of strain CBS 142345
atgaccaaaacagatgaacctaaaaagccgaatttcttaattattgtcgccgatgatttagggtttacagatgtgtcgagttttggaggtgaaatacaaacgccaaaccttgataaatgtctaaaggtggtttcagattcactggttttcatactgcatcggcatgttcgccaactagatcgatgttgttgagcggtactgacaaccatttggcaggtttgggccaaatggctgaatatgccaggcaatttccagaaaagttcaaggataaacctggttatgaaggttatttgaactataaggttgctgcattgcctgaaatattatccccagaatattacacgctgatttcggggaaatggcaccttggattagaaaagccatattggccaagtgaccgtggattcca

SEQ ID NO: 18 - DNA, 60 bp, Artificial sequence
  partial nucleic acid sequence of arylsulphatase
atgaccaaaacagatgaacctaaaaagccgaattattatccccagaatattacacgctga

SEQ ID NO: 19 - protein, 19 aa, Artificial sequence
  AMINO ACID SEQUENCE OF SEQ ID 18
MTKTDEPKKPNYYPQNITR

SEQ ID NO: 20 - DNA, 2602197 bp, Kluyveromyces lactis (residues 1-1,301,099 of 2,602,197)
acaccacatacctaatcaaatccgtacaccacatacctaatcaaatccgtacaccacatacctaatcaaatccgtacaccacatacctaatcaaatccgtacaccacatacctaatcaaatccgtacaccacatacctaatcaaatccgtacaccacatacctaatcaaatccgtacaccacatacctaatcaaatccgtacaccacatacctaatcaaatccgtacaccacatacctaatcaaatccgtacaccacatacctaatcaaatccgtacaccacatacctaatcaaatccgtacaccccgctcctccctttctggtaattttacttttatttttttcatttttttcatttttttcatttttttattttttcattttttcattttctcattttctcttttttaatcactctagacggatttcctcttctggtaattttctttttctcattttctcattttctcattttctcttttctaatcactcgaaacggatttcctctttcggtaattttgcttctttgttttttactttaatttctttttcctcttctcctctttcgctttctcctttcactctcatccattctcattcctcaatttatactttttttggcagtattcttgactgtttttcaccatttccccttacccgcacttccatcacattttctttgtcaatccaccttcttgccatggccaatgcttggtcctgctgggcctggtccttgcataggatacacacgttacccgcacaattatcacccattttcaacttcttccaacttttgctcctcttgccatgaaacttcatttcaaattacttcacttcatcacttccttagttaccctgctttattataaatcacgtgcttcccatctcccgcttcccatctcccgcttcccatcacctgcttctcttcacctgcttctcttcactttcatttttcatcccttctcattctacctttctttccctctctccctctgaatatcagaattctccactgtttttcacaattactacttacccgcacttaaactacacttctccatgttaatcaaccttattcctatcctatcctctgatctcatcctggccgtgcctaagctactacagttacccgcacaaacaattcccatcccacatctcccatttctgcttctcttgccaccaaacttcatttaaaattacttcacttcttgaccctaatacttaccctgctttcttctatatcacgtgcctcttatctctcctctcccacccacgcttttccatttcacccaccttctgttctatatcgtttcatacggcacgaacctcagtggttctctcctgtcccatcccatccattctcaatccatacttcaatcctgtttttgtccgggttacccctttccttcaaatctgtttcattttcctttttttcgcttttcatttttcattttcatctctgtcatttcatacggcacggagctaggcacttctcccctgtcccatttcctcacttcttccctctctctccctcagctttcccatttttttcatttttttcatttttcattgcactcactattcctgctaccacaagggtccccccttgtaaatggatgaatcttgctgaacacaagggtcctcccttgtaaatgggtactccattactgaatacacgtgactacttcaaccatcccattttcatttttcattgcactattcctgccaccacaagcatcctcctcaaggggccccccttgtaaatggatggatcattgctgaatacaagggtccccccttgtaattggatgccctttcctgaattcacgtgactgattcaaccattttcattttcatttttcaccacgatcaatcaatcctcgtgaatcatctcctgaacttattcacgtgataaccagaggaagtgtttttcattttcatacttcctgtccatcatccctccatagagaggacctctccctctgtgaatagaatacgcttctccatacacgtgaccaccgcaaacactctactaacaactatctctcgtgaatcatctcctgaactgtgaactatgaactgcctattcaatgtatactgctactctactgtttatatcaattgctcgtctattcctctctctccctctccttcctccctctctctccctcttcttcctccctcttcttcctccctcctccctttcacttttccatctgaaaccttcttttccttttctaaagttgaaaaatctactgaaacgcagtctccagaatcactggaaactgccacagcaccacgtgactagataatgtctttttcacaacgacaacttccggcgaactgaacttacttaaacaatctgtcgttctcgactttaattattctttaatttactcatcaactaaactcaaactgcagagcaataagtccaaaaccaaactactaacatctactaaacatctactagacatgtcatctcaccctttccaggtcattgatttgtgtgctcctgcagaagaaacttcacgtctgctattagaagctgcaaatactcaaggttttctgtttattgacggccactctttttctcaacaacaagtagatgctttgtttcgcttatccatggagtacttcaccaatactccccaccacgaaaagctgcaatatgctttcgatgtcgccaagaattatggatacactgattatactcgtgaacaaggggaccccagcaaggccaaagacttcaaagagtgctacaattttggttctataaatttcagcaatggtacttacaacggccaatcgcggtctacttctgaaaattgtatgcagcatggtgaagttcccccattgtttacttatcacaatgacttaattgttgacagcatcaagaaattccatgagctggccaggaatatcatgggattattcacggtagcccttggaatcatccaagaagatttctttgtatccaggttcagtgacgataagaagaacggatgtgtcatgaggttgttgcactatccccttttcagggatgatggcgttgatggcagctctgggattgacccgacgctaagaattggacctcattcggattacggcgcattgacactcttgcttcaaaaggaaggagagcaagggctggaagtgcaattggacccgggctgtgaccagtggacaaaggttccgtttttgacttccagatacgaaggttcggctcctccaattgtcgttaacttcggtgacatgttgagcttttggacaaaaggcgttattaggagcacgaaacacagagtgaaaattgaccctggtgaaacgagatccagtgacagatactccattgtgttttttacccatcctgacgcagacactaccctagatcccgttccaagtagagtcatcgagagtaactctaatggcattggggcacctccggtgacggcttacgagtatttgtctgctcacctctcccgcgtgatcaactcaattcccagtcatgacggcatggtataggctgcgtcacattctatgacttctttcattttgttttacagttttttttacaggttttttttttgagattattaattttcaattttctactgtaggcagacagagtgaagaatttctaacttgattaactgctattgagcaggtcagccactaacttcaaaccctgacatgtaccctcaaatagttttatatactcccaatacttaccgtacctagtaatgaggctactgaataacgctatactccgaaggagatacgtcggaacattcgctgatgagttataaggtatatcactctctcctattggaacactctgataataaaaagtcatttattttgatgaaaaaagaagagtgaatttgaatctttggatctagaacttgacaacacgactgcataaatgaccagcatgagggccggtggtgaggaaggcctttcacatgtttccctctgcaactggtaattgtgcacctgtaaatcatcaaccggtcgagagagacgaagtctgtcacagagacaacagcacactctcgaactctcgaagttcgaacgtctcagtattgcaatctattggaaaaaaataccagtattgatgtctgcagatattctgctgggtcatctcatcttttatgacaaattttgactctatctcttttgattctactcgtgttggtatgtattttcttcttttttcttaacctggaaacatataaatatacctctaaagaatctgacgttgcacaccaactgacgggatacttcacggtcagtttttatctttacaacctcggacaacttgaatgagtgcaactcttcagagcatcatgtccgagaataatactaccttcagagagaaaggagaggccgctaccagcttggaaacttcaaacatttcttcagcaggagaattgaaagatcctggcagactcgaaaaggagcaaactatttatgaatttgagactgtgccagaagatgaggatgatagctacaacaaaataaaagttccagatggaggctatggctgggtggtggttttctcatccttcttgttaaacttctgcacctctggtgcgtcgtatggttacggtgtttacttgtcatattacatggatagtggaaaatacgaaactggaggtaaactcgactatgctgccattgggggattgagctttggtgttggggttcttttttctcccttgtacaactatatattgataaacacttcaccaaggaagctcatttcgcttggaatcgtcattcagaatgttgccgcgttactagctgccttttctaccaaattatggcaggtgtatctgactcaaggtgtgttcatctcaataggtacaggcgcaatatgctttccaaacactacaatagccgcaccatggtttaggaagaaaagatccctagctctggggattaccgtggccggtacgggggttggaggaatcgttttcaacctctccacccaacgcattattgataattatgattccaagtgggcgttgatttctcaatgtatcatatgctcagtgctgagtactgtagcggtgcttttgattagaaccagaagagacgaggttcagaagtattctgatacgcccacaacagcagtggcgctggatatgttcaagtacccagtgatatggttattgatcctttgggtgtgtttcaccatgcttggttatgttgttcaggtctattctctgttctcgtttacgatttctctcggctacacttccaaacaagcctcggcggtgtcctgtgttatatgtgtgggaatcattgttggaagacctcttgtgggacttgccgccgataagttcggagcggtgacaacagggatgttctgccatctgattgtagctattctgtgttatggaatgtggattccgtgcagaaattacgcaacagttgtcgtgttcggtctcttcgagggaatgttgatgggatcaatatggctactactcacttccataataacacggttggtcggtttgccaaaactagaagcggtgtattcggtagtgtggatgtttcttggagtgtgtgctattgtgtcacctgtaattggtatttctcttgcaaagaacaatgttaagccaggggagaacgcctacttgtacacggcagtttactgtggaacagcgtacctgttggcagcgttagctctttggtgcattcgcggtattattatcgcacgcgacaaagtaagtttggttgaaaagactggctacgatgatggtgagctacatttgagggtaaaccttgtcgatgcgctgaaaggaatggcgcactacggcaagttatatcgaaaggtgtgagaaacttgacagtgttgttccaagacgttgtagagacttttccagttagtcaagtattggaagaatggctgaatctagtgtagtccaggagaaagtatatagcatctagtagttgaacatcaaatccaagcttataaactgaggattctttgtcccctctcccattcgatgttgataacctattcgttattgatctacattaaccaatgtgccaaatagaagaaaccaaagaaaacgtcgaagaagcatcgaatcacatggtaaatattattcactaataactctaacctcgaatttaatacccggagctttccatcattgcctaaacacaaagctgaaatgacaggcatcagattttgttctatcaacgaatcctttcttaagagagtagaaacattgtcggataactgccaaatgctaaggccccataataccaattacaaaacgcaatgcttttgccacaaaccgattgcccattgcagaatacggcatcctcgacatctcttgttactgccccggcaatgatctgttttaccgcagaattgcccacagttgttgatcgctctttgtttcaaaccacttggagtagctactaatgtgtggggctcggctatggtttctgtaaaggaaccatttacactagcttgtacctcctcgctttcaataaaattagctacattaaagtgttagtgactagcgaaaaagtctgaagttgcagcaactgttgcgaacgattcccaacggtaaaatgacccgttttcaaagtacgcactcacattcaaaaagtacccactactgttgtcggcggatgagataacggtgaatgtatcgccagctaaactttgatcgaacaaacggaaattcggaatggaactagcaagcaataaacattcccagctgaccatcgtatttgtgctatcggacttatttggttgcttgaatcagaaactttcagcaataaataattgttgctggaagagtttaagcttcaagttgtattatcttggcatttctatatctacataccttttacatgtgagggaatgcggttttatcttgtagatgtctgtttcacttacgttgctgcatatattcgttccttacattttcaatgcagtgcaaaaaatggctaacaataaaagcagaagatgaagaaaattgaaaaagtcaaagaataacgaagctccggtatgtggctagtcagacctgtgcagaaccatgcagaccagtccagcgtttattttcgtttcctttttcccttttttgcaacttttgacgttgcctgtatctcattccttcatgagctagcaatagcaggtaataacgtagaatgttgaagtgaaggaagaagctgcggggaaagtgtgttcagcttttagacttaattttcatggtactacgtgatctctggaggaaataatcctcaagcttggtttttaggcactgcgaacttgtcgctgagcataattcaacttaatccatgttttctggagcctttaacaataaatcctgattatgcactgcttttcattccgtattaggtataatgatttggggtgttttgggattttcactgatcatagctcttagacttaatattttcgattgccttgaggttcaacaaccagtatttcttggttatgatcccacagcctctgtttgagcaattatcatcgcgtgataacatgtatcggaggaagtagatcttttgagaaaaaggcttggcacctacgctacctgatatacacaaacagtaagcgatgatgacacgtagcagttcctttaatgtggtccctggcacgaatgtgtaccggtgtcaggtatcaaacactaaacactcattcgtatttaccaaagatataaaataggtgttgtttactggatctgtcgtaatatctttagctgtatcttcacttagtattttttgatgatcggtttatatattatcatttagacttcgctcagtatagataatctaataccgccgccatgtacattagcttggtttatttggaagttttattgtccttttcgctactttctccggctgcagccgctccgctgcctgatgcaaactccaccgctgtcaactcacttgaattcgatatggtttccaattccacttcagtttgtttcaattccactaactatgccattgatgtttctgagctccctcttccagaatggttagatgactgggattctttattacttgctatgccgtgcggtgatgaaattttcgtttctgttccaaaagatctggacagcaacactacagcaaagatactggcttattctttagcttctggtattgcagtggataattggaatagtgaactgcagaagagagaaaacattcaggcagatcttgatgccttctgggaaacaggcactgttgagctagactcgctatcaattgtacaaaattgattgcacaagaatgttgtttctttgcggttgtaggggtatttctaaggcgtcatttagtgaaccattgctaaataagaagttgagctgagagcaactaggatcagcatcaaggctacagcaccattatttgaacatcagatgtaacaagtatataagtagaaggttacttcatccaattttcccctctggatttgacgacatattaattattgttctacagtgacttatatgtcagatgtaagaaaccaaggggaacaccgtaagtaatttacttaattagtcgaagttcgtataccgatcaccaatttaactatccgattatttcattaacaactacaagtcagaatggcatccagttacatcaatactactaaccctctaggtcaagcccctactaccaaacttgatgaatatccagtgcaacataaagttcttggttgtgaggtgttatggttccaagtaagactacagactctacttcgtcgatgtatatgtgcggaccatggcagctattgattatgttcttgattatggtaatgattattaatcaaatacttatctcagtgttaaacttttgattttttagcttgatttctaatcaaaatactagtgtaaaatgagagacattgtataaaacaggaacagctcgctcaagcaattacacgtctgtggaagtattgtcgacgattttgttcaaaatattacaacactaaggtcaatgaaagaattctttgtcacaggtgagaacactctgaagggcggtgaagatgcccaaaattcggaagttctggacggccagaaaaaagcacgctccatggtgtatagcaccatcaaatctgtatcttatctagatttacttttgcccttcaccattctactctgtatgatagtttccatattaatatctgtctatgtgccgtcctcccgtcacacattcgatgctgagaaccatgctagtttggtgaacgtctccataccacttgcaatcgggatgattgtcatgatgattcctccaatttgcaaagtgtcttgggagtctatacacaaatacttgaaggaaaagtatgtatggaggcaattattgctatctcttattctcaactggatttttggaccattgttaatgacggccttggcatggttagccttatttgagcacaaagagtatcgtgagggtattataatgataggaatcgccagatgtattgcaatggtattgatttggaaccaaattgctggtggtgataacgatttgtgtgttgttttggttgtttgcaattcggtattgcagatggtcctatatgcgcctttacaattactatactgctacgtgatttcaaatgaccattttcagggttcttacaacgcaatgtttagcgaggtggccaagtccgttagcgcatttcttggaataccattatgttgtgggattctaattcgtttaatatttgtttacagtattgggaaacacaattatgaaaagcatattctcaaatacatatctccatgggctatgataggctttcactatacaatttgcatcctatttgtcagtcgtgggtatcagttcattcatgagattggatccgctttcttgtgtttcatccctttggtcttatacttcatcctcgcctggagcttcacgtttgtcctcatgaggtatctaacgaacacaaagcccagtgacgatgaaaaatgcgaatgcgatcaagagcagcttcttctaaagaaaaattgggggaaaaagacttgcagttcaagctaccccataactatgacacagtgttttacaacagcctccaacaacttcgagttatcgttggccgttgcaatatcgatttatggaaacgatagtcagcaagccatagctgcaacttttggaccattgttggaggttcctatcttaatgatattggccattttcgctagatatctacggatacgattcatatggaggactgatgttccactcaaagctgaaagctagcaaataaaagtatttatcaaatatgagcataccctctagatcaagtccctactaccaaacatgatgaatatccagtgcaacaaggagagtttgaatacatttcggtggtgtaatacaaaaacttgagatgtttgaggaatctgagggagtgagaaaaaactgaaaaagaaatacattaatcaatcaagagagaaacgtaaactgttgaacctaaggcaaaaaaccttagtaacgtagagatcgcacttgaaataatattagacgtacatcgaacatttttcatagttatcctatttttgtcgagtgttgttttgtaaacgtcgtcagataatgattcaaagaccacttgtttgaaagaatattctcagtccaatcaaagctaccatactcaacaagatacaaaacaaaatcctgatcatagtcagacgcacatagcagtggaagatgatcatgaaattttggctcgattcccaaaagtacagccaaattacttcgaacagagctcttttgggctgtcgactgattacagtttatggaagctgtgctatgactattttgccttgagagaatgcaaacttggtacggtctattctcatgaagctgcaggtgttgagtggcagctgatatttacaccaactattttaactgtgatccgtcatactatccgacaatcgatgatatagagtgcgctcttcatgttttattgaattcgagtggttacgacaagaagttagctttctgtataagactctacaatgatgaccggtcattcacagatttacgaattcaaagagctaaaaacccagcatatagacaaattaccgaaatgaattgtaaaagaggatatgaacgaagatttcctgagcaatgtggtgtatttactggtgggatttttttttcactggacagattttttcaaacgaaaaccagacaaaatcctcagaagcgtagaattaaataaaacacaaaaaaacaaaaatcaaactcttagaataatctgcaaggagaaccgaatcaaatagaatactataggctaaatcagctcatcacttatcacttaaggatgtttgtatttgttgttcccagcatgcaccaatggtcccagcgcgacaaccataggaaatcccaataacacatatgggaaacgagtaaaactagtagcacgaaatttgtaacctttattcttttctctaatacttcagagatgatttaaccggtggatttcaaagggtaaaacactcgatattgattaaatgcaccaaaatttgttcagccagtaagcaaatgaagctgctcaggttattaattcaataatttcatcccaagagctgtaaattactcctctaccaactcccatcaaagggaatttttctgatgaatgcatcgggtactgagatgagtcgtatatccatggatttgagagttcagaaaagtatcaaaggcaaggagaagcgtaagttgaaatttgtttggaaagaacagatgtgggaaccaaggctttgagacaatgattaactttgaaaggctgaaaagattttgcctttgtaaagcgcttcttttccaaaaaatgctaacagataagcttactgatcccttttgtgtacatcgaaaactgcgaaagacaatgcccagactaattcctgaaggagcaaatacttttgtaagcgtgcagacggatgatgtgcgtagagcaccccacacacgaacctattgcgttccacacttgattgagcacagtgaaaggatccgcattcagagagctacgtatttgaagaggcttttgcaaattaatacaaggtacctacgattctcatgcttcattaccttgaagtatattcaagatcaataggaacattgttttcttggctaagatctactgatagacacaatgagtcgacaaggcttgtttattttctcttcaagggcgtgcaggaaattgcgcctcgacatttgttggtacccccgttatttcttaacttgtctgttttcttctgctgacattgtttcgaaaagggctaagaatttcttcataaggcttagaactttggcagttttcctgccgcaggaaagcggcaggaataaaaaaaaagaatgttggacgccgttttcattggtcccgtgatcagctgttcaatggcagctttccacatctccacggcattcctcctatagcccctacccctatccatggtcctgtttcttactttgatgctagaactgtgcatggttcagggcttctctaactaatcacatttcatcgcatatctgcctatggggagcatatcgataatcaatccatcttgccattggcattgccttgttgtatcggacctaagatataaatacactcatggaagttcaacattttacgatcaatgttctgctttcggagggtccagaatagctgaacaaaacaaaatatccaacgaaaatcactaaacagcagcaatattcatcgaaacaatggctactggagacgcaagtgaaagttttcaaaagtaccgttacgacccttctaaggcagctgccatagccgtatgtgcaacttttggcgtgttatttatttcgatgattattatgatagctacgtctgtaagaaggtttgacaaaatgagtgccagtaacaaacgcaaagttaggaacttcaccattttgagatttttaccatttttggtaggtattgccatagaagctgttggatacggtatgcggtacatgtctgtgaatgataccgacaagttgacgccatacattctccaatctgtatttcttcttgttgcgccagctttgttcgctgcgacgatttacatggtatttggtcaaatgttacattatctacaatgtacgaagctttccatagttcctgcacgttggagcacaactatatttgtgattggtgatgttttaagtttctttgtgcagggtgcaggtgccggtatcatggccaatgctgacacgtcaagtgaatcaaaaactgggtccaacatcatcgttgttggattattcgtgcaggttgcagtcttcggttttttcatgatcacagagctacgtttcttgcttcgagtaaagcgcactagcgctattgttccgtacctttcacttcactggagaacgctcaacttaacacttctgggcatcagtttactaattctgatcaggtctcttgtacgtgccattgaatttattcaaggtaataaaggcttcattatcagtcacgagtacttcttgtacgtgtttgacgcgctaatgatgattcttgcttcattggtatggatcgttactttcaaatttggagacatatttaagatcatttatgaggtcaaactccttgattctttcaaggagaagagtggtgatgatgccagctatatgcaaactgaagcttttgataaaaagtgaacaaaggcccaagtaaagttcgtgtatgtttttgaaatggactttgatatccaagtatgatattgtgagacgaatttttatgtagttgcagcagatacataagaaacaaattgaataaatgtcatattactattttctgactaattcttaaaggattatccgatcgcgatattttgactaccaacatcagcagtcagaaattgttccagtactgaaccacgattccaaatttgcaacggtgtacagacagtatactatccccacaaatctagcatatgccagtaactgtacccatagttagttccacattttgtgatgaccacactttttgctgtctatttttttacagccaacctgacagatgtcaaaaggctacgtatctttctttaagggtctgtagtcggacagaaacctctgcgtcctcttacaggtgccgatcaaaagcattttttcaaaccttgtaaaaatgtcttcgagacatattctttctttccacaaagtcacagtgatgaaagtttaagaccgctcaacggccatgaatactaccagcaagtcaaacacgtactaaactagtgtaacaccaatctcataattttaattttgtcttcaccgtaatacttcatttgtgagagaccccgggagttactaattttgaaatagataaacacaatgagtctttgcagagactctcaagcaatgtgggccaataacccatactgctgtttcaacaatttaacaaatataaagtcaggacctctctaacagatgatatgtgattctgtgtggttgttctttcttatacgtaatatataagatttaaagaattatcatctatagaaaacaagcaaaatacactaccatgtctgaattgaaaatagaaaacgaagatgctgaagtagtcgataaagatgataaattgcaaaacgggaaatacaccgaatttgagactagctcagattcaattgataaaaaggaaaaaaaaattgatgtcaaagatgctgacgaacttcttaaatttatggacaaatacgaatctaccgtggaaccacttactgaggaggaagagaaaaagtttgttaagaaaaacttcgctgctgtatctctattaaccattcttgttacgttaatccttttcatggataaatcaacaatcggttatactaccattcttggaatctatacagacacaggaatcagtaaaggcgactttaacaacttaaattctatattctacgctgggtaccttattgctcaatggccatgtcatatattaatgcaaaaattgcccttgggaaaatatctcgctggaagtattttctcctgggcaataattgtagggttgacaggaatctgtaataattatggtagtttaatggcttgtcgtttttttttaggtgccaccgaagccgtggtggttcctgcttgtgagattacccttggtatgttccttactacggagcaacgtgaaattgttcaaccagtgttttgggcagctacagcagcagcacctttactttcatcgttcatttcttttggattgatgcatacgaatacatccacttatccttggagaatatttatggcaatcaatgctggtttatcgttgatacttgccataattgtcttactcctctaccctgataaccctgctaacgcaaagtttctgtcaacaaaagaaaaagtctatcttataaagcaagtgcaacggtcaacggaatcatcaattgaacagaagacaatcaaaaaatatcaaatttatgaaacattcaaagatccagtttcatggttgttctttttccaaagttttactcttatgctgtcaaattcattgacataccaacagaaccaattgtatgttgatatcggtgtcgacaacctaggatcttcattggtttctgcggctgggagtgtttgggacattctactgtacttgatattcgcttttgttatcctcaactatccaaatcaaagtggttatattgcagccggttgtctgattctaccaattgcgtccagtattgcgatggttacaatagattggtccaacaaatatgcgttgttagcctgtatgatcttagccggctcctcaaagggtatcacatacattattgctttgggatggacgacatcatctgcagccggttataccaagaaactctacaggaacgtaatgtttatgttggcatatggcgctgcaaacatcatttctcctcaactctggaatccaaaggatgccccaagatactatccatcctggattattcaaattgtggtttcattcttccttaatattgttattttgttaacaatcagatacattttggcgaaaaggaacaaagaaaggtatcaatgggttcaagaacatccagaagacaactttggtattgtttctttcacagaaggagtcaacgaaagagttaatctagccatgctagatcttaccgattttgaaaacaaaagatttatctacccactatgagttacctttagtaggagtgtataattttgggatggagcaactatcattctgtaaatcgttcgtcaatttctacaaatttacccaaagctctgttcttttcaactgcatatatccacatttctagaacgtcattttatggaaatattgtatatttgaaaatggggcatcgctatgtggacgagtacgaatagagcctttcacaatccataaatagctccaaagacacataagcagaaatttcttgtgttatcgtggaagctattactatggctttgttgatcctgcatatcaaatagcattaacaagccactctttcttttaagttgctgaaatatcagttaataactgtcagtccaattatttcctcaaaagaacattgtcttgctacacttcactgcactatcctttggtccttaggatcaattatataagcgccaaaataaagaggtaatgaagatcagttttgaaattggcgataacattttatttcggccctatgctgtgctataccatcctgtctctaagacagttcctaatattatatcattgaggccattctgttaaggaatgctgtttttttttatattgattccagtgcatgttgaggcaggagtaaggatgtgagaaatctagtaaccttcttcgggtgatacaatgcgtatgtcggctttctgcttttacagtacttgattgtttaataaagtccttcagcttgcatgttgttgttatagccgagtactctttatttgtagaatacacaatcacgaacatcaagcatagtatgcattgcagttcaatagcaaatttcaatatggtagatttctaaccatttcattcagccagaagttctgttagagataagtttacgatgtaaacattatagtactattataatagcatacattaaaactgatgtaaatttcagatttcaaatgtgcgaaatctgtcccacatacctcctgagatctactggcatatcagaagtcttatcacgacttattaccaactcgtatttctttaaatgcctaactgcactccaaacggccgatgaattgttaaagatgacaatcttatgttcaatagacgatagctgtaactttaaatgatttcctaagtgggcaacttctggtaaaactaacattacgctgtcttttgatagttcttcttgccaattttcgatcttatcgaacaagtcttgtgtaagaacgtaacatttcgactttggttttacgtctcttatattcgggtttcgctggccacgatacagatataataaataacctacagttactgccactgtcgataataccccaacagctataatcgaaagcttcttttgccgggcttgcttcataagggacttgtttagccaattggtggtttccttatctcctcgcatataatggcaatgaggtttctatttatgattttgattccatttcacttgtttttataaacaatatatcagtatgtacaatacataaataagtagaaaccagagaaccgtcaacatcttgaacccttaatctttcggcaacccacaatgatagattctcctattttttatgcgacgactgtccatttggatcatattgtgacggctttgaattgtttaacaccttttggagtgaaaggtgaaatgctcatcaccatagataaaaatggtttgtcctttgcccaagaaaacaatcatgtaatcaagatccaattggttctttcacgggagttatttcaaacctttcactatagcccgataactgaaacatctttgaccaaggtatccctgcggcttgaccatgtattggatagtttgaatatcagtaacgatcggaacgatataattgagtgtactttaacatataatggggatggatccccattcatattaatattcgaagataacatgatcactgaaagcgtcgaatactcaacatatctgctcaaagacttagacaacactgggttggtactagatagaacgcgactgcaattcgaatgcataataaaaggggatgtcttacacaatgccttacacgatttgaaggaaattggatgcaaagattgctatttttatgcgatacataacgaaaccaccaaaaagcccttattcgcattgatttcaagatctcaacaaggtttatctaagatcatattacctaatgagagatcgattttagagaagttcgaaatatacgcaaatgattcaaccaccctcttatatgatcatccaatgataagtgtttttgattatggaatgctagacaaaatacgagccagtgctcggattgcttcaaaaatcatgatacgtagagatgtacatggtttgatgactgttaatatattgaatgaaacgaaggatatactaagacctaatgaccaggagtataagaggactagagccatttcaggtaacaatctaccaagtcattatcctgggataattattgagatatgcatgcttgagaaagctcttccagagcttccagacgtaaatgagataaaagtaatgatgattgaatatatgggaagtgaatcgcgccataatttccttcccaatacacaacaaccgccgaagaaaactgcacatgacgataaagaagaggaaaatagtgacgggtatgaagctgcttcgcaagatttgccgctattcttctagcgcaaccctgcttcgacaagctgaattaatcaggttggaattaacgtcattttaggtatagatggaaactatttgtaaacatatagataccctagaatatatatacaaactataaaatagagcattttatcaaaccaaacaatgtccatattcccatgaagaaatctgtttatgttattgttgagtatgagaaaaatgagtaaaacagaagcgttaaattggatttgaacatagattcaaaatccactcatttattgttggctgaaatgttccaaaagaatttctctttcttgggtgtcagcaccccagttcttaacaacaacaacggaagcaccgacgacctttctggcgttaccgtcacggtcgatcttacccaaaccggcccattcacctaattgcttggcatcagcaaccttgattaatggaacgttgttttcagtggccaaaccttggaccaacttgctgatggcttcttcagtaaccgattcaaccaaaacagctagttgaccttcacctctggtcaaagccttggcagattctctcaaacctctggccaaaccatcgtgaaccaaagaggttctcaagacgacctttagggcatcttcgatggtcaattcagcgactgggacttgttggacttcttcaacgtcagacatttctaatttgataaaattttctaaagtattgacttcttcgacagtggtactgctccgtgaagactttagaataacataaaactaaaaacatactaaactaataagaagaccatccgaaacgttttattcaatactcttcaacatattagcttaaatcatgggaattcaaaatataaagcttccaccattcaccgtgaaaaataactttaaggtttagcgcactatatacgttcaacacttaagatatttcagaatcaacagacgacagcggagggcagaacaactgcgtccttttctttcgctgtaatgtccaggtgttttcgtgaacatttttcttaagactagtccgtggtggcgcgtactatgttgacgtgtagatgccatatttggaaattctttagttttcttcagatttgaggaggattttggaatatgtacgggtgcaaacaaatatgacagtcactggtattttaatcttgttcaagtcttttcattaagattagaagtgatgaatacaacagcatgggtcgcgcttcgtagtttaaatatcaataagcgctatagtctagtagtcgttctgtcaactctgacgattcacgaatttgaactgctgtttgcagacagtacggatgtcataaatactttcagcatatctccgttgaaaagtccgtcattatacacctgggatatcaatcaatggtaagtttaccaatgatattgcaccacgtaggaaaacatcacagctttccgtatccgttataagacctcctaccgtccatatgtagtcttgatcgtagacgatgggattacatgatagtctcagcgcagacaaaggcatatcttccgtatattttgttctggctctattcatgatgttaacaacttcgaagtttctaattacccgagatggtaaactgatgaacgtgaaggttccatcggtatcatgcatgggatgttgatgtttttcgtcatacttgtagtctttccagtataaagaagaatccacgtctttttggctcaatcctccaattaccacggtgatctgtttattatgtacaaaagtgtgtcccgtaagaggaaattcaactattttgagctctccggtctctttgtccttggctttcaatgatagttttgtccaagttccctcatctaaatcataacaccacatatcaccgtgaataaacttatttgcggaacctccatgtattattagcgacttatttaatcttttgggactagtgctggaattcatggttcttcctggaatcatcggctcgtttacaacgggttcatcgttaatattgtcaactattttgaaattatgcattagtctgtctaacagatctgcgtccatagatttcggactcaaagagtctgtatctacgacataagatgccataaaacctctaggtaaaggccattttttgtaatagtccctcagaaatgcttcatcaactgcgttttgtggtaatctagatattattgtcactaatgcggtgtcagcaaacttcaaaaagttacgtttgccccgagataggacggtcacttcgaccttccataaatcggatatcggtatgaacttgccatctccgccttctctataaccacccataattaaaatgctgtaaacaccgggtgaacttgatgaggttggggaaatgatattatcggaactcaatgccattgatgaggatacaaaattcatcatagggtcttcgaaagtattagtagaggaattcttttcagctgttgaggatgacaatgaagaagggggagaatcagtacctgatgttgaacttctggtagatttatgggtgtgtgttttcaatgaaacctgtagatgtccaaatctggggactgtattcggatatttcacgtattttgtaggttgcgcaacaagctgtaatttggtgaacttgtagcacaaagtgtccaatatatatgcagtatcgttcaatattgctcgctttttaatgtagtattcgtttgttttaggatcaattgaaacttcgtgttttatttcaaagccaccataatagaatatatgcctgtcggttaaaatagagccctggacacaaactaaagcgggagggatctgtcctgtggcattcacttcagtccactttgttgacgtataagaaaatgtgtacaacttattacttggaagcatagccgggttattaatgattgtttcgtctaatggaggcggaaggtgttttattccgtctacgtgaaaactggataagtccggggaaacttcggagaaagaataggatggtgacattcctccaaaaatatacaaacagctatccaaattaacaatggaatgatatgttagggcaggcactctagtgtcactaaaaattgggggatacagcttagtaatagtaattggacatgtttctgaataaggaacgttgagtttgattttataggatgtgtacagctttggctccatgtccggagagcttggttgccacctagcaatcggcacccacatattttcctcacgttcagatatctcaccggaagaaaaagagtcgcagttcgatgaaaatttctgacggtacttaatgtaaacctttgctgcctcagtggcctgattttcctgagtagtgtcaatgctaaaagaatttgtggacttctgctcttcaggaagacgatccatgttccatgatgagaatctatgggatagtgaggtcctacgtcttgaagatctgctctgaggcgaattggtactttgagagacatagctatctttccgtgttgccaaagagtccaatgcttccttatgatagtaattccttaatttctgtagatttacttccctttcttccttcataagctccgcggtagcagcaggcgtattcaatgtaggaatataactagtgatataaggaattggagaaaattgtttgtattgaccatccttattgattgttttgaatgtagatgggacgtcgttccattcataatttaaatggtaaggttgatcgtttttaatggcacgttcctcagatggcctgggatcctgactaagaggatcaagagcttccatattgaacgatgaatttggagctgacaaactatgcaatagctttatctgaggttccctttattttaaagtttattcgactgttccttaattgatttgggggcggattgtaatatttattgttcgtttttctttttgtcttttgtttttcaagtgggaattatttattttgaagggcgtaaggcacggctactgggcaggattttgtaatcaaagcagtcataaattgcaggttcttgcaacatacaatgaactccttgtaagttagttcacaagatagcctgattttggatggtgaataccaatttttttttttttttattgaattatcaccaactttattgggaagaaaacgaaacggcacaaactaatatagatgctttgagatgtacataagaattgaagagtaatatgaaaatataaaaacgaagccttcagtcaaaagctgcgaggcgtgcgaaaggataaggtagatataaaacatgaataaggaaaagtgcaagcattgttccttgctgaaagtatggggaaagcacattgatttaatttcccttttttttttgtcgattatgctgtcttttattgagaattaggtatgatattagaagtttcgtagactttcttctttttcttctttttcttaacttctccaggtacaataaccgaacgagatctctttaattttgcttgattattcgaagtaactccgtcatccgaattaaaactggttgtatcggtcattataatttggaacctctgttttgtgattaattgatttgtcttagatttgtttttattcccatttctgttaagctttggttttcttactttttccgaagtagatgatatgtcatgtgttgtacccatactggaatgtatattagcgttattaatgttaattggttggttgttagtgtccggtgctcttaatgacggaattgtgagcccttctttgaaggatcccattttcggtagttcaaaacttgggtcaagtctgaacttctcacttttatttagggatagtttaggtgtcggtgatgctcgaaggtgaaatagtttctcatcgatgtttggatctctttcaggcgaacatttgacacctgacgaatgaagttggatggtggtaggggatgagcaatatagcttcgatccagggctttcattccttaaagctggtcttgaagtaggtgtagactgtaagttatgctttcgggcacgatgaaagtcaaccaatgcgctgttgttcgaagaaattggttgcatcattttggtaaacggtgttcccatttcattcaaaatccttctgccgtatggcgtcaaggacatctgttttcgaggcggagacaatgaagtcttggaagcagaattgaacatgaggtttacatcaatattttgcaatggagagtgaatggaattcatcaatcctgtgttattttgttgatgggttaaattcgtattattagtgacaaatttaagaggtgtcttggcgggagtttgtctttgttgccaaaagtttaaacctgctggtgagtccatcaaaaattctttgaattgttcaggactcgcaagcaataattcgtttgcaaaatttccgaaatgcaacacagaggaaggttgttcatttatatcaggtaagattggttgagagatgttatttccagtgattgctgttctagttgctgccgctgacgatgatgatgaggatgaagatatagatgacttcccatttctttctgttgagtttgctgatgtctggatggtagaaccttgattggaacctgtaacaatggaggcggaggctctcgaattcgaggatgacagaagcacttcaacgtcgtgtgatgttgaactatgtgtcgtaccagtaaattcagcattgatagagttatcaccatcagttaatatttgactactattgacatcgatatcattggagctagtgttcggatcaacggtgggtcgatggctgtgctggtgatgacgctggtgattgcgatgattcagcatgctattttcaaccaatgagtaatcattcaaatcggaattatccctttcaacagcgtttatatggtccagtttgttctgattaagggtgtatggagttggtaatgtgtgttgcattggttgcggactattgaaggcatatttagtaccaagctgctcttgccctgcatttgaccggtagatatgaggacttgtcaagtaattggcttcctcgtcccttgaattcatctggaaatctggtaacactggtagcactggtaataatattcttgatttattgttacggtaaacgaatgtcgttgtgagaaatgaaatgaaggcgtagttggctgcaatgtaaaaaattcaaatgaaacaaagagagatgtccagttgtttaaatataaacacaatagtcaaactgtatcttgaaattgaaaaacaaaaaacgatacagagtgtaatctgaatccaagcgaatgcttctttttgtctttaacgagaggagaaaggaaagtcacagtgctgaactaaacctgaaataaggatcccaccacacgcgtactgttactctatgggtatgacgattgatgaaatagataaacgtacagtcttaaatcaaatagtgaatctgtagtagtgttccaatgcaacggtttcgtaaacaaattccaaagataagctaactagcagaggatataaagtatgatttttgtatcacttatgcgtaaatgatggttgtttgctattcccctctgttgtaatatcttcaagcttctgggaattatatagtattaccgggtaggcagaattaaactcagttaaacgtccacgaattgaaacagttgttccatgaaatatcgatagccaggttgagagttatgctgaaggttgtcttagcttacatttgttttgtttcgttttgttttgtttttttatttttatcacagaaaatgctattaacagatgcagaaactacggggctatgagatggacccacaaagaggggagcgaaaaactgttaattacccggttacaatgcgacgcgaaaaaatatgtaaataataatgaaccatgtcgtggttatagctgtattccagccgggatctgaaatgtcagtagaaaaggttctgcagcgttttttcgtttataccgcagataagaagggctttattcgatgcgatactgtgtatccgatatacattagaatttacatgacggagttcattgaatcctcaagtttttctacgcatagaagtactacaccaatgtaaatgcagtagaaatattgtcgagaatcccaattatattactgtcgtactacagcgcatcttttcttgatagcatcagttatcgatctttctttgcagcaaacaacgtgcgaggaatctaacatcagttttcatactttttataccgtttatgttttttttttcggttttcttaaggctttacacattgtggcatgaagtcagaagaaaagtaatactgtttcgaaacgacagacgccagatgtcacactttgtttttgccgtccaatttcctactttttataggtgtatatgtatgtctgctaaatgcaattgtatcatttatctatatagttttctctttgtgaaagcgctccgcaaatgcagaaagtgcatttgagaaaaacatgaaaacaataataaaaacaagattaaattcgagaatgaaaacaaacgcccaattgaaagaagctctgctaattgttgaagtattatgagtttacaagaagtgaattcagttacagataactgtagaataccattcgttttctaaaagcttacaaaagctataggcaatttctttgttcggttctacgagctattgattgatagctctcaaatattggcgttgaatccttagctgattaagtttttatttagcattttgtgcttcatcgactagcaacaaacaagattttttgaagagatctttgcgcaagtaaaagttgacaaaggtgagacaggtttaccctctcgcgttattttacctaccggaactcctaaagatcaaatctctagatttcagtgctctatatctaaagttgagtgtccaatcgaatttgttgcaatcgttcttttattcccacgtcattgcttgtacaagcttcgcgtaccattgtaaggcttacatttctctggcgagaatcagaacacccgtaaataaaacaaactaagtggggaacaccttactgcgcagtctgtaagagttcactgatcaacatcttctcatttcatctctcaaattgatcgatatggatttagctgagagtttagaaaactttcatattacgagtcctgagaaggtcaatactgtaaagcgatcaaacggaaatttcgaagatttcatcaacagtgatgatttcgaagatcaaaacgaacaacctggtatagcaatcgaacgtccgacgcttgagaaagtgcaacttaaaaagactaaaaaagctgaacttaaaccatataaagaaaatgaaaacccattgccacagcaatttggttctttccttagcaaaatggacgattggtcagtcaactacggtacagtaaaagctttgaaggaggattcgaaaacaaatgggaccatggcgcaaaggttaaataacttggatgaaggaaacgatgctccacaggctcagtggaaaaattatttactcaaaccaaagcaaaagagtgaccaatctgcgaaagatgtatcggatttaattgtgacagcatcattaagtgatctttctttaattcctgcagatacattcaagaagaaggaaaggaacgatctcagtagtctaagtcatgaaactgatcctgcacgagaagcaaaatcagtctttaaaaatgttctgaaaaaccaaagatccaattatttcagggacaatgataccctaaccactcagaatactaagaattcaaatggtgccaaccagccatatcagacaaggaactacataaattcagacttcgagtccggatcccgtcccgtgtctggatcagaagattttgaatcgggttctgattcaagttcggattctctatccgaactgaacccatcgaatctcaactcacctagtcctaagcctagaattgtaacgaacaccagaaggttacctctgataactccagaagatgctgggttagtatttgatcatgaaactggactatgggataaacaacgtatgatagccgctgctgattccaatatatcggaaaacagtaccggctcatttgttatggaggaagattcgacaacaactaattcgaattcgaattctcattctagtctaaaacccatttcagattcattcaaacgagaccctaccttggacaattgtatagatactcaaattccggtcattgcaacggccaatagtgaaattgaaagtgggttagatgatgaatatttaggaagcaacgtaacattaaacactgttactgatgacaccccattgagtacacccaaattcaatagaaacttttatcaaaaagatacggataagccaatgactcgttatccttcttcatcactgcacaaagaactgtcgaacattcattctcagggcaccgccaatattgctgatataactagcattagccggatggatacttcctacgatcttaccaagagagaaattgtatcgagattattagagattgaacccaacccaaccaattggcagactctgtacgaagtagatctatctgatcaagcaataaaggactcctgtactggtattgatgaattattgccgaatttaatcaacctcgatgtgtctaacaatgagttgatatcgttacaaggcatacctaatcatatacaaagtttgaatatttctaataacaagctaagatcgcaacttctacaatttcaagacttaccgcatgtcgaacatttggatctttcagacaacaacctaagtgcattgcaagatcttaggttcactgctccgttgtcacatctacactacgtggacgtttccaattgcggtattgtatctttgatgggccttccaaaattcgccaaagttgatacgattatcgccaaggataacaaattgataggttccatagacttcaagcaattgtgcgaaacttctcctataccgtggcaacatgtgacaaaacttgatttgtcaaataataggatcacaaatctcaaaaacctacattatttggtcagtttgagagtgttaatattagatggtaattcgattgaacaattgcatagtggctcatatcatcaaggttctaggagtcgtgttggaaagaagattgaagtaggaaaccccgaattgcgttacctaagtatcaaagatggcggtgtccctgtacactccttttccgggtttcctaacctacgaatcttacgaattactgtggcgatggacagcatcaatattgaagagaatgcaatcgattcacatatgacaaataacaataatagcgatatagagagtcctaactacaatgcatcgttgataccattatccgaacgattccccatgtcattcccattggagcaactggaaatccttgggatgcctcattcaagtccgcgtcaaccatcaaagcaaatgtttggaacttccactaatggtagaaagcaaaagcttggttccgatccaaactcatcatcagcatgggaaggtttcgagttcccaccacagcttcgtcgggtaaccctacgctcattaggactcacaagagtcccacaaacgctcacgaataacacgggtctaagctcattagatatgcaaggtaataacatctactccgcacaaatattattgccttcactcccgtgtaatttactccgattaaatatactacagaaccctgtgctagaagaacctttgcgtggtaccgacaaaataaatactgggagcggcactaaccatgatttggtggtgcatcaacgcagaaacaaggacttactccgtcttttactccactggtgccccgcccttgtggagtgtgacctctgtacggaggggtaaaggaaatccaaatgaaagaaaaaaaaagaatagaaaatagtaaaaaacaactgaaatctatcaaaatcttatagaagagagaagtttctctcatgaagggagaagcaaagaggggcaccgcttaactggttaagtgagagtctatattgtgtttcagtagacagacagagtatctgtaatccttctcgacccctccctcctatccaattctgtcatatcaaacatcgagaatcggagcttcgaaaagccacaaaaaagaagtgttattacctattgtttaaagtgtagcttatacaccgcttgtgttctcatgtaataaattaactaatgttgcttagagctacctagataatgttgtgtcagtaatgcaatattcaaaacagagaggtccagagaccggaaataatgaaccgaatatacgcaaaaaagaagtttctccgatctcgatattgcaatctgccgaaaaaaaaaaaagggcgtcaatgattagctaacataagccagaaatacagaaacactggcagtgattgaagttttgatgtaatctgttgtattgtgtttcttttagacccctctttcaactaccaagtatcgtgcctaagttattgtgtcgggaggggaaaccggaacggaggggcatattcattagctaatatagtaaacgagtagaaatatactggagatttgttttcttagcaaaaactggtgtttgaaattcacggagtatattgaagaacaggcgcgggcagtgcagcacatctaatagtgttgctataaaccaagacaacgagatactgcccttcgttcggaagcacaactcaagtgaccagtcacacaattctagtttatccaccagttgttctcccgaaaagaaaaaaatgaaacgatattcagagtgtttctgctctcttgcgcttatttaccggtatttacattaggccacaatccaatttgcaacatttggctagtgatgggacagaggttttccttttatgaccatactgtaaagggtttgtatccacgtagtatcaacatacgttaagcggggtcattcgagttctcaacattttcccactttgcttctccatttttatgagctacggcttttctgttgttttaatcacccttaattcagacacttccttcactttagaattgtatatatacatatatatatatatatataagctatatgatttccagtttattcactcaggacgctatttcaggagatttggacttcagcaagaaaaattaactaattacagataatcgacctagttgatattcctctaacgctatattttgtaccgcgttgacaatatacattatttaaggttcagatatcattgacaagtttcccaaaaaaaaaaaagggcaacgaatactgacacattgaaaaaaagaatcggaatttcaactagacgctttgagttcaaaattttaaccataataccatattcgtctattaagaaaaccagtgcgattcaaaaggcaaaacttttcaaataaaatgttattacgtactaccactgctggtactagactagctttcaagtcacaaactgcggcattcgcacatgctttacgttactattcgcatttaccattgaaggtcaaggttgatttgccaaatggtatttcatacgaacaaccaactggtttgttcatcaataaccaatttgttccttccaagcaagggaagacttttgaagtgttgagtccttcaaccgaagaagaaattactcatgtttacgaaggtcgggaggaagacgtggatgcggctgttgaggctgcagacaaagctttcaagtccggtgtctggtctaaggttgacccactagtcagatctcagtgtttgagcaagttagctgattacattgaaaaggatttggataccattgcttctatcgaatctctggacaatggtaaagctatctcatctgctaaaggtgatgttcaactagttgttaactacctaagatcagctgctggctacgctgataaggtggatggtagagtcattgatactggttcgactcatttctcttacacagttagagaaccattaggtgtctgtggtcaaattatcccatggaacttcccattgttgatgtgggcttggaagattgctccagctcttgctaccggtaatactgttgtcttgaagaccgctgaatccacacctttgtctgcactatacgtttctcaatacattccaaaagcgggtatcccagacggtgttgtgaacatcgtttctggtttcggtaaaattgttggtgaggctattacaactcatccaaagattaagaaggttgcattcactggttccactgctactggtcgtcatatctaccaaaatgccggtgtcaatttgaagaaggtcacattggagctaggtggtaagtcaccaaacgttgttttcgctgatgcaaacttgaaatccgctgttcaaaactctttgttgggtatctactataactccggtgaagtctgctgtgctggttccaggttgtatgttgaagaatctatttatgacgatttcttgaaggaaattaagtctgcttcagaagctctaaaggttggtgatcctttcgatgcagaaactttccagggtgctcaaacttcgcaaaatcaattggacaagatcttgaaatatgtggagattggtaagaatgaaggtgctactttaattactggtggtgaaagaattggtgacaagggttactttgttagaccaactattttcgctgatgttgaagaaagcatgagaatcgttaaggaagaaatcttcggccctgttgtcactgtcaccaagtttaaaaccattgatgaattgattgaaaaggccaacgactctgaatatggattggctgcaggaattcacacatctaacatcaatactgccatccaggtttcaaacagattgaatgctggtaccgtctggattaacacatacaacgacttccaccactgtgttccgttcggtggtttcaatgcttctggtattggtagagaaatgggttctgaagctctagacaattacactcaagtcaaggctgtccgtgttaaattggagtaaattggctgatatgtagttacaggcacaaggtctgcacatgagatcatgatatttgtatcataaaatataacttacggaaatacctccaaaaagaagatgcatatcacgctcttcagctcttcttattaccgattttcgcgagtaagttgattttctggagaattctgacaatctttatatatcctgattatttataccgatttggttagctgtgtttcatactgtgagatgcagaccattatttactattggcgtatattatgatttaatgaaaatgctaaatgaaaatattctttgattaatgtcgtctttgctgccttagtacaatttggtagtgcgactcatctgatatctacatttaggctctatccaaacaaaaaccaatgcattctgcaatttttctaaatcggaaaataaattacgtatattgtctattaatgaaataataaagggttatctgtcggaattattatcaacctagaagattgtacgtgttatgactgttcttatttatcttcggaatctgacgcactaccagactcttcaacgatggaaatttccagctcttcatcgaaatcagaatcaccttgcagttggatggtcctttgcgaaattaccttggaagatggcgttgaatatcctgtggaggcagcgatttctgtgacagtattcgcggatggcccgtcggatgtttcgttttctatttttttcggttttcttgatgcattagaggatgaactgaggtcaatgccttgagaccacatcaagaactttagcatacccatgcaacttatagaaacaaccacgaccatgaaagcactgattaagaaacctttgtataaatcatcaacttggaggaaccaggcaatgaacgtttgaagtgttttgcaacttttaatcttttcatcgataagcttcaagtaatcaagatggttttctttatcaaccacattcttgtatggtgtctttttgctggattcttccgaggtatctacttcattcacatcttcagaatgagctttttccatcacgacttcaagttcctttttctccaagctcaactttggtaagaaagttgagttaccaaccagctctgcctcttctatagactttccaacgtagatattgtcgaatgatatatcgcttgcacttgaccaaatatcaaaggaaattgcagtaatagcatcaatgttcgctggtgttttatcctcataataattgggattcgctatgagaggcgccttccattcaccttgataattggggttagggatcatttcagccttccaagtacctctgtatttttcattttcaaccatctttggtctccactttccacaaccttgtttcgtatagcacgaaggattaacaataaggggagcaatccatcttccatccaccttgtcattccaccaatctggtttagaacgcgattcatcctcgatgtattcagagatgctgtcatcccattcctctggttttttgaacattggatctggaatccacttgggttcattttcatcccagtcttccggttttatggcagtgggatcagggatcatagacctgctgccccaatccgctggctgactagcagaaggatcttcaatttcccttggaggatttaggctgggtctgaatgttccctccgcaagcaagtttcctgccttgacaacttctccatcgattctaatttcaaatgactgatctgcagagtctaatatcaaggtgtataaacgagtaatcggttggtctaatcctgaaagtggtgcttctgttaagtacttgtcctcgaattcttcggaaattggattctcacgcttcaagatgaaatgtacctcattagtgtacattgaacaagagtcgggaccaaatactaagacatagtcatcggctgaatgatcatactgactgagatcatcggcattggtttttagtaatttcatgtatgcgccaccacattcaagcatcttctgtaatttaacctcgtattgcacaactaacttttccttggtcttaacagaaatctcatgatccaatttatgggcaatcgctgatcttgtttgagagctacctaataccaatgctaagtcattagagaatcccggaactaaatatggggattccaatttccataatcctgggaatgctcttgacatggtttcatcaacgtgttccatttcaagttccgaaataacccaattgtgaataaactcatcatgactgctgtactggaatgactcgaaataggagtcactagaaagctttgattgcaaatccgataaatcagtcatgttcgggtgctcgattctataatcgccctttaccataggatttatggccacagccagcgttccgaagcctatttggctcaaaagtagcaatgggttcattgttggtgctgtaactgtttctaagtggctaaagaccaataaatataacgtagtgaaaaagataaaatcgtatgtgagctttaactgtacctggccttaaacttaaattatgtgttaaacttatactttttttttctgttttgcagaagtatttttttagcccttcgagattaggctccatcaaaaacctccacagagcactcacttcgtgacagcgtagtaacttcttcctcttttcttcaccagcaagtttactattacaaagacattctcatatcaggcgtttcctagaatgccaaaaatataaatttatatgcgtatattttgtttaaatagaaaccaactcatgcttttatgcttcgacctcatcttccaaagatgcgaatgtattaacatttgagggttgtacaggtagttcagttgattgttgaacttttgcactatcgtacacttctacttcattgtcatccatggactgttcatcgccagtttctttcccattgtcttgattatcggcttggtccttttcttcgcttactggttgtatgttttgtaaaatattcagttcatctctgatttttgcatttgtagaatcccacccagccttacgtgcagactgtacgtacttggccctatggatagctctttctcttttaccatcaagcctattgttaacattcaacacacgcataactttactacttgttaaagaactgtcatcaagctgttgttttcctactcttcccaagctctttttcttgtttcttggaccacgtttattcagcttagcttccagtaattgttcgttcttattagcagttctgattagtgatgctgcaaaatcagtcttttctgttcttggtaatgtttcgagagccttcgcttctggttctgcagcctctgatcttctagcagcacgtgagtgctttgaaatgggtttcttagccatattagtctctgatgttcctggcgtgtataacctggagtctatactctagtttctatatttcctaagatccattggatgagctgagatgagatgagctactctttactttaatctatcgttattgtgtgtattttttctttttctttcccatagtgaagacgaacagagttgattcagaaaattgagggtaagcgtgttaaaaaaaaaaaaaatagatcataataaccctgaaggtgtggacttgtaatgcaagtgatgcggctttattgttatatgatctaatgtgataaaaatgtgtggtgcctttctgctgcagtgtgaatgcatgcagcacaataacgtatcttccactcattttgcattatacaggtactgtaacggtttccacgtaataagatatataagggaatatcttcagagatccaagaccctgcttttaatgttataatctgcctagatatttatatatttaaactgtagttttctcatttatcaaataatagtaatgtagatgcattttagatgcacatatgagttgataggtttttgtttcaaaacatgtgatgtgaaaaggggacaatcagggtatcagttggtggcatccaactcaccatgattattaggagtcaacaatatcttgatgtttttctctttatggttcattaattcgtcgaaccctttagtgaacccatcttcgattttttgtctacccgtaatcaaatgtctagctttatcaatagcaatgctgccattgcctaaggcttggaccacatcttcaaaatctttaatggtgtaacacatggaaccggtgacgaatttctcttgcagagtgacgtccataggtttgaaatcgatgggtttgtggccccagattgcaatattaacatacatacctctgaaggtagtagcatggacacctgtatcaaaagttggtttaacaccagaacaatcgtaggcaaaatcgaaaccttcaccacctggagccaatttcttcaaaatattaacggcatcttctttatgttcagaaggatcgaaggtttcgacaccaagcttggcagcttgatttcttctgatttcagctggttcagagactacaatcttggaggcaccatgaccttgcaaagctaaaatggtggctaatccaattggacctgcgccaagaactaaggcggattggcccttctgtaacttggagattctaacagcatgccatgagacggagattggttcgactaaggctgcaacgtccaatggtaaagtgtttggaatcttaacaacgtgcttttcactaacaacgactttttcagcaaaaccaccactgtgaactcctagacccatgaaacccaaatgggcacaacagttgtagaaccctctttgacaagcagcacattcagcatccttagcatgtgcagcgttaggccaagtgtaatgatcaagacatgtaccggtggcttctacaacaacatgatcaccagccttgatgttggttacttttggtccaacttttgatacgataccggacatctcatgacccatagcttgaggcaatccaagaccactaacatcgtggaccttgccatcttctggaaagaaaataggaccatctaggtattcgtgtaaatcactaccgcagataccacaccatgagacttcgatttcaattccatcatctgtttcgatgacaggttcctccaaatcctttgtgtatctgatgtcttgttttccgaaataagctaatgcacgcatctttgagattaaagttaattgaaactagtgtgttttcttagtaaattgtagtatgtattcttgtgtgatgattgggtacacaatatactccttaattctttagaatttaaatttggttataataccgaagtaaaagggagtggctaacaaataaatgaaaatattaactaccttagaaaatataactttggaagtgaattgaatgagaggctaataaaagagaagtgtcttcccttttatcttttcttgaagtatattatccctactccaccctccctcaaactgaacttgaatagtatgctatatttgcaaatcattccactaacattagcaaaggcaagttccgtaatcagaaaaaccgaggcatgcgtagtgcacacattaaaaattacccagaaaacagcaagaatgcattagacaacacgacgtgcaataaatccacagaggctgctagaaacatcactactcacatcaaaataaagggaagaaattatgcagcatgggatacataacccggaacacggcagataaaacacacgtgagaggactgcagacaactatctagggcttcccttgcgaatctcatcagatgagaaaaacgacggaggggcaggacaaagaccacgtaagtgagtataatttgcactttaatttgtccaattacactacattgtttacatcgtatcggtacaagtcatttcatctgtagtgctttggccataatcaaataaacccgcacctaatagaatcaaatagatcaaccaattgggttgtgttgacccggatccacgcgataactgccgtgaaaataaaataaaaaattccccagtatattcttgattctacatgattcgttttttccgacagattgcttttctatttacctgttccttttccctctatttgtttccagaacgtttattttggtgcatcttgtactaaatcattgagacaggcaacttgtactcgaaaaattataattaaaactaaacccactaatgagaacggaaaaaaaaaagtaaaatcgtttgttgaacatgggcaaacatggaaaggtggatattcaagtcagtacagttatccttcgttgttctgctgcccactcatataatgcgtatccgcgaattttagcattgtttgccgatcaaaagtggcatataccatgaacaaatgtcgatgaagtttttccgtgatatacctagcatcgggcgacacaatttgaaatgcacattttttatattctctaattggttcaagtaaggatccagctgtcggttggtagatttgcttttagcggctttaatttcttactatagtcatacgtcactgtcaacagagctggaaaacatacctatcacatgaattgttgcttatgttattagtggtgattcattcatatttttctgcaaaaaaaaggcaaagatcgggcaggaaaagaaagatcaagaatgtttgacgcagagttttagttcgattgagaacagaggctcatttcaaagtgaatcatcacgtaaggacaaaaaatgggctccttttcgtcataatggtatatgtatttggatgggtctataaatcctaacgtttcagcgtttttttagtgacattcttcgttgtcttcttgctatcaactgtagaacggcttaccagaagagctttgttacggataatatgtgtttgcgatgggagatgcagcctagaaacgcgttttcttgtcataccagttagttgcttaactcacaaattcaatgcagccgatgattcttttactccgggacagatcgttttgagtttcgggctttgtgttgctttatatgcatatgaacttgttatgtgcttcgctagctgaacctttgccaaggcatgcaatataattctagcgcagataactattccgagaagtttctgattgggaatatagccgaagttgagatcgtctatgaattcaaggagagttgcttcatgttagttcatggcacctacttgttctcagtcacctgacatgggtctcttttgaattgaaaacaagagaaatcaagttaatgacccatacacatcaatattataaaatgtatgtgccttgtattaaacggcacactgtatgcgtgcatacagatcttatctacgatccgtttatatatggtttaatgtgtttcaatgccgtttctctgtataaccttgtcttcgtgacgagtccgcctactttactggcaacactctgacaaatcctgtgccttgttttggaatttataacacgtgaataactcaagatataatggatgaaaagtggaatgcaactttttgcatgaattaacgaaatgtaacgattcttcaattgtattgctttgctaactttttcaatgatatacaggagattaagaatctaattttttttcggcccttagcatctagacccaagtgattaattcttcctttggagtaagtaggatcttgatggttccttctttgtcattgatcaatctcatgaatgcgtcttccattccattctctagtgaaacttttcccgtgatcatgaaagccgcttttttgaaatctgttttaccttcggtgaaggaatcaacgacgtcctcaaaatcctccaatgtgtaacacattgaccctgtatattttttttcctgtgatgttaaatccattggataatgcttcacagagctgtcaccccacacagcaacattgatggcagttcctctgaaagttagacatttgattgatgattcgaaagtgacagaaatacccgaacaatcaaatgtgaaatcgtatccttcaccatttggagataatgaacataagtttttgatgttttcctcattggtcttgaaatccatagggttggaaacaatagcacccattttttcagctagatcacgtctaattttggcaggctccgaaaccacgatatcagtgcacccaaagtgttgcaaagccattataatgcccaacccaatcggaccaccaccgagaatcaatgcagattgaccttctttcacagctcccaatttcacagcatgccagcaaactgctaaaggctgaatcaatgctgccacatcaagtgggatccatgatggtactttgaaacaatgtttctcaccgataacaactttttcagcaaatccacctgattgtacaccacatccgcataaccctaaatgcacacaaacattgtgcataccccttttacaagctttgcacgtttcacccttagtattatacctttctctgtcctgacatgtacctgtaggctccacaacaacatggtcacctggttggaatttagtcacactagagccgacttgtgaaaccacgcctgccatctcgtggcccatggcttgaggcaatcccctaccactaatttcatgtgtttcaccatcttttgggaagaagtttggtccgtcgaggagttcatgtagatcagtaccacagataccacaccacactatatcgatcaaaacatcatccggtttttcaattactggttcaggtagatcagtggtgaaacggatatctctggttccaaaatacgctaaagcacgcatgtttttgtgttattactcttcctttgtctatttcaaaaatcaatttccaggaaaccggttattcaacgaagtacaatggaaagcttgactcttgctaaatggaattgatagcttttttgttcacacagaaacgttctaaagacagtaaaggtatgattcttctgtaattgaaagtaatagggcctgagatatctctttttgtaatagcaaatgagggactaaatacatgatatttcaacgttcattatctcgactccatgaaaaaaaaaaaaatgagcgtcataaaactgcgggttcttgtcggtaatttttcttaaaatcgtcaacctgtgttctctgttaattgtctatggttacttgctgctacatgagataaacaaagtacaaataacaaggctacagcaaaatgagtttggcattaaaaaaacaacaaatattctcattaccgaaaccaaaaacaaaaacaaaatgtaatatcctaacaaaaatgctagtggtaaacggataagaattctctgaaaaacacagcgtaaatccgtcactaaacccggacctatgcggcaacctgaagacaagaattttctatatacatacatatgatgacataattcttcgaaaatattaatagatgcaaaggggcgaccagtcctgaatggcaaaataggagcttgattgaaaaaaaaacacaaatacacaacacaaaaaaaactcagagtgttcatgcatgtgaactgggccagctgtaacagtagctaattctcctatccactaaattgataattggcttcttattctcgagcctgtgctcgatgcttgaaagcagttgttgcactgaggataagttttcctagaaaacgatgtagtcatgtaggagaggagaaaaggggatgaggagctgaaaagcagccatcaagtaacaaccggtacgggcacgtctacgctggaattgcacgagaacattcgaagaaatataccagccacccgcgcatgtcgggaaagaaacaaatgtcattcatattaccttcttttgaatttggatatttcttagttccactgagcatatacgcaagggggaaatagggaagagaaaaaaattacttgtcagaacgaatgggcgctgaaattctatttcgttatttatcaactacggcattttctggtagctccttgtttgcatgagggaaaattagaaagaaatgaggaaattctatgccttgatcccaaccaaaagttaccaaagaagctcaatgtaatatacagataacaccgtagcttgtcgacactttaagcagtgctatataaacattacttccaattcagtaattcttgagaatttctttacatgagcatttcggtgttttcatcaggaaaattgactttgaagtaaagtcaacgatgtgggtacggtatgttttcgtctttgaaggatatacaggttacttaggaatagacaatggtattctcaagcgtgtttcttttttagttacatatctacctgagataaccgttctctgtcgaagaggtgattaatgttatttttgtgggtcgaaatatcagtgccgttggcaccagtcacagtgtcggaatgattccaaacatcgtgcagaaaccttgtcatcttcacgccgacgtaactatgagcagtttctgccattttgttaatcaattgcaagatataatcttgatcttcaggatccgtgcagaatgaaccggacactaacatggtccaggaaagaattccccatatctgatgtccctctggtatttctttgaaatgttgtataatttctttaacgcattcttttacgggggacgaatgtgcgtcgaaattatcaaagtcgatcatcttggaagcaaatagataacaggacttagcggttagtaatcccaccattgaattgatgcggaaattgaaccattcaatctccttcatcggctgttcgggcataggatgcttgtattttatgcatatatttcgtagttggacaactttcaataaccatgtagttgtaagcggcattgagagacgtgcaatataagataatttagcaattatttcgaatatgtctagacatgatcctagtaccggattcttcatccattccaaaacattctcgcaattgtacactgggcaactcaatgccttgttcaattctttgaaaataacaaaaggtgaaggcaatttggatatgtcttttgcacatagtaccgaaatagaataatggtaaatgaaactctcaacaaacatccgttcatgcggatttattacacggttatcgaagtaccgatgtgatattaccttatatgagtctgagaggaactttactgagtcatcaactgttccgaaaaatgcgttcttcacccggatacatagcaactgcgttgatccaaatatccaatcttcattgtaatattgaggattggccgacatatagtctcgtaacaaattcactgatgatacaaaataatcatcactgaacctttgaaaacggtcaaaatctttccatgcaaggaatgtagcaccgcaacatagaaacacttgtctcatgataggattgaaacttacaaatgggacaaaagtagcaccaacagttaattctggtgaagtatattgtgtgcctaattttggaatgaatccggtcaaacatgtgtaaaatatgaaggactctaaatcaactccttggaaaaatgtgtcatccaagatctcattcctatggtatcgctgtaagatatcaatataacgtttttcttcttcttctgttggcgtttccaactcatagggtgggattgttaatccatctggaatatcaacaaagggaaattccttaagctctagatctaatggcgcaatgctgttccaacattcgtctttcagcaaattcttttcatgatatttaatgtatcttgatgttgagtctttgggtaatggtggcagttctcttggaaacttagtaatcttctgcagctttttaccgtcatataaatataactcatcggatcttcgtttcacatagacctccattcgaagatcagatgtcctcgtgtatttaattctatgtttcaacttgagatgagtgatattgaacttggtatcttcgctttccacctgagaaatcttcttgccgactttaccatcttttgtgttgctactgtttggccatatacactctagaaagtttctcttgcaagctgtgcaagtcggcttgacctcgtcgcatttcttctttcttcttctgcaaattaaacagcctgtcgaacttcttttctttatcaccatagatagaagtaaattgcaagattaactattccttgaaatgcgtgtatattattaatgatgctcccatttaccttctctgttgatgttcatctcgcagcgcaccttcatatatcctgaaattgaagatgacatgcgaattgcaaaccaatctttcacccatctcattattacacatattgctgcaagtcagaaaaaaaaacgtataaactacatttaccaaggcaatgggcatgacacaaaagaaattaaaaggtagctagctatctacataatatagcagtctcatgttttgtaaattatgaaagtcaaaagaaacatgttatagacaagatgagggcaacaagatttgctggatcgtaggctaaggagatattttaacacttttgacaatagaactagttttaaaactgaatgccatttattaatatataaaggtaaaacagaaaaaaaaaggcgccttcaatttcatattctttaacagttgtagtagtttctatatgagatcggtccttgttgtcagaaacaggttggccttacaaatgcaagcttaatgcatggatttcaaatcctaaatttatataacaatttaatacatcttggacaccattacatattttaggcaaggtgataagagcatgtcatttcaaaatcattcaattaaaagtttgggtaaaagtaacatacgtagtgacggggtttatctaaaatctatatgtgcatgcgtttgtgcttgtattacattagaaacggaattaaagttcatttttaaatttatgcttttctaagataagaacactcactttagaaaacatcaccttggtgcaacatagcatcagcaactctgatgaaaccagtcaagttagcacccttaaccaaagatggcaaagcttcaacgttagattcgttagaatattcctttgcagtagtaacacagtcatcgaaacaagtagtcatgatcttcttcaattcagcgtcaactgtttctctggtccatgaaactctagcggagttttgagccatttccaaaccagaaacagcaacaccacccatgttagaagccttacctggagcgtaccagacggcaggagcactagcggaggcagtttgcaaacgaacaccttcgaagacatcgatggcttcttgagtggaacccatattagaaccttcagcaacgaacttgacaccattggcaaccaagtgttcagcttcagcaccagaaacttcgttttgagtggcacatggcaaagcaacatcaaccttacctacgtgaacccatggtctagcaccagcgatgtatttcacagaacttccagagaagacagaagcttcaccaacgatttgttccaaagtcttccaggctgctctaccatcttggatagcgtagatgtgctctgcagtgataccagtttcggagatgacagaacccttagaatcggacaaagacaaaacggtagcacccaattcaatacatttcaaagcagcatattgggcaacgttaccggaaccggagatgacaacacgcttaccttcgaaagattccttaccttgggaagcatacttgatcatagcttcagtgtagtaaatcagaccgtaaccagtagcttctggtctgatcaaagaaccaccccagttcaagtccttaccggtcaaaacaccttcccaagagttcttgtagtgacggtatgcaccgaacaaataaccgatttcacgaccaccaacttgaatgtcaccagctgggacatcaacgtcttgaccaatgtgtctggacaattccttcatgaaagcgtaacatactcttctaatttcggaatcagatctaccctttggatcgaaacatagaccacccttggcaccaccaagagataaaccagtcaaagcgttcttgaagatttgttcgaaacccaagaacttcaaaacggacaagttaacggttggatggaatctcaaaccacccttgtatgggcccttagcagagttaaattgaactctgaaaccagtagcgacttcttgttcacctttgtcattttcccaggtaactctgaattggatgattctttctggaacagagacaactggcaaaaccttcttgtagacaggtttcttgtcgaacaaagtagagtctttcaaacagttgtaaacttcgttgtaggcttgttggaattctggttcatatggttcagcagacatctttaaaagttttggtatagtattagttcttattacttttcacaaataatcaatctatgatgaaagtaattcgtactgtatcgtagcctaaggtgaaatggtaacagaagttttaataaaagcactgtaatcaagaagtaaaaagacgggctggattggaggcaagagatgtaaaccatcgtgtatttatataaaaaatggaacaagtcaactaactaccagttcatatgcgttggtcgattaaaactgtataactgccagacgtcaagatagccacaaattacaaagaggagcagagatactgaagaatttttgaatcaatcaccaatcaaatacaggatgggaccaattttttcttttgcgatatctggcaatattcctcttccttttcttcttcttcatctgaaataatgcttccatcccattcaaacaagagttaccgatcgaagcatccgtagaaaacccactgggcaatagaataactcaaaggtcactttcgcactttccgatcgaaaaagtaatgaaagaaagcgtattgttgctcaataagccttgagctctgttcaaatactttcttttcgctaagataaggaaattcgtgataacaaataggatttcgttttcagctcatattggcattcatatccgggtaattactgtttcgaacttgccagtactattcccagaataagaaactaatcagaaaatattgtaggaaacccttccgttaaaagtatcattctcatattaatgcggtcctagaagtaaccgtggaatctatcaatgtgttactgaactaaggcagtctaagcgtttcggaaacacactcgaccgcttctaaattgtgtcagcggacggcgaaaaacgctatggtgggggaggggacaatcagttagcacatttcctccaatcaaatggtggaaatggccgcgattaataattgcgtgatacgctcgaaactgtccttttgggttggtattcagtctttatcttttctcatttacggtgggatttatgaatatctaggcgacgcactagaaagagaaagaagtacagaaaataaaccttatcgaccaatcagatcacagaacgctcctgttacggcccggttttcttgttgccaactgaattgcccggtcggcactttccgaatttcttacaaggagaacgccgagtgaaaaaaatggtaaaagagcacaaacggatcgaaccaagtagggtaaatatacacgtgatacaatactgacgttacccagctatttgttttctgtcggaaataaacaataattgacgccgttgaacggatttgtttctttataatattaccctacctgcacgtgctaccaagtcttataaaaattccgagatggtgttacccgtacaaatttcggggtgtgttttgtgccaagattcttataaccaaattaagaaattttagggtgttgaatttttggatggtttattgattttctttgagatgagttcggtgacggaaatcctgaatttatcgctgagaaagtatgtagtaaagctaattctttatactctttccagcttaaattgataccgatgattacgaaacgaagccatgtgaagtagtcgccagctgtttcgcattgtttcattcttccctccgattctcttctttttattgaatttcatctcgtgttctgcgtaagtgagtttaatctctactgtgattcagatatactggaggggaaaccactttggaatcagtcttattcccgctctgctttcacaaggccctgaatacgggtgtcaagttgttaatactgaacgctattaggttcattctgttattagagtgcattaattacaatagcggaatacattttgctgcagacgtggctgaagaataaacttcgaataagagtttaccttggtgtcggatctacatttgtgattagtctgagcttacgaatcaagaacttctctctattcctacagttgatcaaaagtataattatcagtaaggaaatttgaagttgctcgttacactacagctgaatcctaccttgagcacaacaatcaactccagcaaaggtggataataaattgttcccgctcagcctttcaaaaacctttaagctgccagatcaaaggacaaatttcccttttcaatgatgagctctttcaaaagtcctgaaataccagatgctgaggtcagacttataacgtgtaaccttcttgctggacaattccaatggggctacactaaatccgaaaatgatgggttctttggtgtttgctgtggaaactatttaccattcgcacagacagtaatgcaatgtttcgtggatttattgcaaggagacaaagtcgcagcaataacggaatatacaacatactgtaatgcttatactggtactaatcttagtattgaaaattctttagagcagttcgcaaatggtagtaaccatttgatatcaaatccaggcgctggagcaaactatgtgcctattctgctttcttcagacgttttgaagcagaattattattttttctattacatttatcataatttcaaactagcatttgactgttccatgatggtcaacatcagcatctggataataatatgcctacttgccattcaaaaaagattaaattgccgtttattgagaaaagtacgatccagattcacttcaacgatctcaacaacacatcacacagaaacaaaaatcttcagatggtatttgacaattttacccaccatcggagagacctggttcttgttgattttccttatcatcaatgtccttgtcagcacgattcattatccgctatacgaatccaatactggagaagggaaaatggtatttttggtgaagtgcgttgccaatagaactggaggacttgcattcggtctcctacccttaacggtattacttgctggaagaaacaatattatcagttcattgactggtatgccgtattgtaccatgatattctatcacaaatgggcggcgagattaatgacgatattcggatttactcacggtatgttatggtctggatactgtctgtggaaagaggccgagcttttggccaactatttgaaaacaactccgctattcagatggggggtcataatcacagatctttcaatcattcttgtacttacatctacgtatatgtggaaatcgagaagatacgaattgttcttgacgttgcatatcgtattagccgcagtgttcttttatggttgctacaaacattgtgaggaattgggatggttaggctggatctacctctcggttgctctatgggtgatggatagagcaatccgattaatcaaacttctgaggtttggaggcatgaagctagcttattgtactgtattagattcggaacacgaaatattccaggtatcgataccaaatagtggtgccatgcggttcttccccggatgttacgcatttttgtacgtatggaacacgagattattctggcatggtcatccattctctttaatgaagaatggcactgacattatcatcattatcaaggcgaaagacggtatgacaagagaactatacaacaaattgcccaaggatgggactatttatccaatccgggcggccctcgaaggtccttacggccacgaggctcctgtagaaaattacgaccatgcattattcgttacatcaggaacggctttgccaggacccatctcgtacctgcaaagaatgcacaatatgaaagacttccactttgtgtggatcatcagtaacgagaggttcttgaactacatgaggtatgctctagaatcattgctgcagcaaaagaaggggaatttcgaaatatacatcacgagaccattatcaatcgatatatcttgggtcccatcaactttgagcattcaccatggaaggccactgttggaagacatcatacaccaagatctttccaagtggaaaaactctgtagttgtatcctgcgcaatgccgttcgtcgatgatcaagtaagaaattacgttgctaaggaaatgcagcagggaactgtagatttctatgatgagctgcaagtttggtaaactgagagggtttttccctagtttctcttcacatctattcattttctgtggtatatttagcaagcactatatagaaaaggacgggacagctcggccaaaaatggtaaatattcccaaaacctttaagaaagcccttgaactgaaagtagtgcgaataactaaacgcgtgattcactttaatcgttagagactcaaatgaagatggcaagaaaaaaaaaactagctcggagtgcaaaccatattcagtgtcttcgaggaattgattccatatcacaagtaaaaaaagaaaaaagaaaccatgcacgtcaagtgtccaactacaaaaagataaacctctttgtggaaccccccataatacgtccttatacccccaaaacctagttaagcatataaccgaccccaaaaacttccgccagaaaaaaagtcattgtgacttgtttctttccactccatatacagggctgaaagaaccacattttgaaataaagcacagaaacaatcgtaacccacagatcttaaccttatttggctaagctttccttccactgtgatgagacatccaaagacataaacgagtggttggccgttactgaaccagtttcattcaacacagcgaatagaagctccaagacaagatgctactctggggaaatctatgatagcgcaccacactgtgatttcacacacttgcaagttagctactgaagagtacgtgtttggatcttttctttcggtttcttgtccggccttgtgggatagagttacatattacttctgttggtaattactgctactattgttactgagatgagtattttatgttctgcatggagtgttgcttcaatagatggactatgtgtaattccgactggggcgagaaaggtggtaacgagaagttcatataaatataaagtatcaccgacaagtacggatttgtcttattatgtgctctccttccaatgatctaattctgtcgcaatataggtcaaactaattataaaatatttccctcgcgctgagatacccttatttgcaaccagctgtttgttaaaacctgatattataaacataagtatcagaatagtatttattagtgtgtcatgaccagtttgaagagatctttggaaccatttaacgtattggaagaaactattccaggcgttcaccaagaagttaagagattcaagaatgctaaaaccgaggagctttatacttccctggagtatgtgcctcaaacacaaaaaggtttagtagtttcttcgttcactgaggatttgaaactgttgacagatttaccagtaccacagaagttaaagccttatgagattttgataaaaaacaaatacattggacttaaccatgtggattggaagagtaaaaagtacagatttagcatttactctttcccatgggtcaatggtagggaatcttctggtatcgtggttagaagaggtgaaaaagtagatgaagaaaaattcccacttggtggtgaggtattcattgccagtacaacttacagagatctcagaacgtcaaccttccaagaatacacagttttcgattcacgtctggtatggagagttcctgaaaggatagggcttgattttgcgtctggtattggcgtcagtttagttactgctggcgcagctttggcttcaaagaggaatgtgaaagttcaaccagaagagaaaaaatccattgtcatctggggaggttccactggagttggtatatttgttgttcaacttgccaaaagccttggatttaccaagattattaccatcacttcaaagaaacacgagcaatatttactttctctcggtgcaactcatatcatccatcgagaagaaaaaacggaagatatcgttaatgagattaaaaaaatctgccctaacggggtctcccatggtgtggatttgatttcgaagaagactgcagaaactctctccagtatcttatcagcggaaagcaaattagtttgcgcagcaggttgtccgaacaaagcccaagtgaacgatcctacaattaaagttgaagcaatcaacctaaaattatttcatgaagatttagattacggccaagagttcgtcagatatacaactgagttgttcgaaaagaataggctgaaaccattatctaatttgaagcttttcaaaggcttagaaaatttctgccaaggtatcagaaatggcctcagagaacttgaggaaaggggagcaagtgctgagaaatacgtcgtagctatttaattgcaaacagacacacagacacacatacactttacttatcccgattaaagaacacacatattccatgggcactggtacccattaaagacattgtatccaaccatcgcatcttctggccgtttttttcattcacttgtataatatttaccaatatatacacattagcaatgcagaacacagtcactaacgaatacagaccaataactttacaacacttatattacggctgtacaagttcagccttattcgactgagtttacacatttcagccggtcgtgctttactattcctatcgtaaacggttctaatgtttttctcttccatgctgcttaaaagttgagacgacagcataatttcttttctattgtgaactgttcaatacggaccgcataaaacaagaaagtaattgacagtgtatctgacagcgtatcaaggaaatgcattatcccaatattcagttatgcaactttaacatctaaagctagtagaagaatgcacttgcttcagtaaaagtcaattgatggcaccgtttgtattactccgttgctcttgttaattgtgtaatcgtgtcgtgccctctactgttttgacaaaatcggatgtttcaagcctacttattcatccaagctgcttgacacaaaagacttgaggctaagaatatcagagtgacagagtgaattgatcagaggccaaaagaaaccgagacttcactatttactgtcatgtctagcttccttttttttttttttttttttaatgcctgagaaacggaatggcagccgttgatagtaatttacagatacatttatagagatatacaaaaattactgattaatttagaacagccatgtgtttgacacagtagatggcaaaaattaattacaaggccccttgtataggccgaaatacttgtgaactttgctcgtgcaacgatttgcttgtagagtataaattgtgaaaattatcaacaaggcaatcaactactccctaatttatagtgttaaccccatactgttttccatttagctttcacgaaggaagaaaatagaagccagtaagatcggctagggcgtctgctacaatttcacctttctgagttagagttccttgaaatacctgtcggatagaagaatctgtaattagtgcggcgtattatttggcaacagttcctcagctttaaagttaatttgaagcgagatttcattttggttagagtaaacaattcagactcaatatgaaatttggtaagacgttcccaaatcatcaagttccagaatggtcccatgaatacgtgaactataaatcactcaagaagctaatcaaagaaatagtggctgttcaagatcaattatacaagcaggagcatcgtgtcgatgggaaagatagagaaaatacgtcagtttcaccaccgtcgaaacctatggatgtcagtacaagaaccaaagattatctgaatcatccggaagtcaaaaccttactggcaaaatttttctttgcgttagacgccgatattcagaaggttgactcattttataatcaacaatttttggaatatgatcgtcggttgaggaagttgttatcatcggctcagttcactgaattcaaccgtgctttgatgtatggagctgcaaatggtaacagtggcctaaatcacactgctgggaatggtaatgggtgcctatctcagcccatgccaacgcgctataatcgtcatcaatcattgacacaaaatggtcatcctggattccatgtgaacccagattcagtaaatcacctcatgctatcctcaaacaaagccactgaagaagcagaagattggagcgaagttttagcaattctaattgaactaaggtcgcattttagaaatttgaagtggtacggtgaacttaacaaacgagccttcagaaaaatcttaaaaaaattggacaaaaaagttggtacttcacaacaggaaaccatcacgcaatctagaattgcacccctagaattcgcaaatgacacggaaatcaacagagacttgcacatcattaatgagctattgaataagatttttcctaaggttaaatctttgcaggctgaaacgaatggtgtgtccaatacatcgaacggatcgtcagacgatagaaattcacccttggatattttttcccaattgattgctcgagatgatggagagagtttaatgaacgaattgatatccgtatataggtcggcagttttaattccaactagggcattagtgggtttgttaaacaaatccgctctttcccaatcattcaaatgcatcgatgagatattgtcaataatccctactttaggtgatccaacagatatttccagtaggaattttttccatcatcatgttatcgctcttggaaaatcccacaaacagattaaggaggagtcaactaaatctcaggttgacttaaactctttgatgacaaaaacattagaaatcgaggctgcattacctccagaaccaaaccatcgcttggtgggtgcttttggtccggatggaatcaactctaatgattccccttcttccttacgttatatcttgcaaaagcttccggtgcatctaagacctagccttttacaaaaagataattacaagagaactccacttcattattcagcccagtacggtttagtagaaacctccagaataattattgaatcattaatcgaatggggtgcatggaacgcagatataccaattgatgatgtgcatgtgtggggtgattccgaaggattaactccaatacacctagctgttattggaactcatcctttgaccgtaagaattttaactagccatttgggtcctgacaccaaacttaacacaccaagactacttcatttggcgacaagattgaactctccagatttgattgacgctcttttaagcgttcccggtttcgacattaattaccgtgatcttgatcatttggaaactgcattatatttggcttgtaagctaaatcttagagaagcagcagaacatctattaaatcgtggagctgacatggaaattggagagaaattatttggatggactcctatatttgttgcagcaactgaagggttcacagaccttgtaaaggtcctcaaagagcatggcgcgaactacgatgcattagacgagagtgggtggtctccaatggaacatgctgctttacgtgggcatttggaaataactgatctgttaagaattgagggtaatgaagcaattaccaatccaaagattgtaactgattggaacgtaggcggcgcttctgaagatattaatgataagaaagaagattcaccaacagtcgatttctacaaacagggaactactacaagctcctcaattgacataatgactgatggaaaacctgttacgaatcctaggaaaatgttaacacattcattaagtaccgggaaagctatctcctctaaggatagctcccagcaggaatccgaaacggtgaaaaagttcggacacagctatttaaaatctaatgaatccattattttaatatgcttaggtggcaacgataccagatcgacaaaaccagctgtgaaattaaacaaagttccagttagcaaagtgtcgtctactgaactagataccgccctttcattagtcataagttgcccagacacactttccgaagagagctttgtgcttgatttacctttcgattctaattcagactcaatcagttttaaagtgccatacaaaccagactcatcacataaaatcatcttcgatattgtgccaacttatggatacaccagcagtagtaggtcggtttctcccaatgcaaatactgaattgagctctgacaaagctgctcataacaaccgtggccgggagcaccagcagtatcgtgagcattccagctttcctggttacccaacctcgatgagtccaatctccatgttacatgcttatagcaacccgccacacgctggtaacaacttcttatctcccgaaaagccaaagattttggggagagctgttgccttacttgatacagctttgacttctgttggaagtaaaatgcgttccttatacgaaactattacggttccaattctaggcgttgaaaatcttgatgttctaggaacagttaacttcgaattcatgaacgtcacaccctttgagaatccccatatgggcttagctagaagcgaaaagtattggaaatcattggtttccactcgtgttattgggcatcgtggtcttggtaagaattttaacaccaagaattctctccaattgggagaaaacacagtggagtcgttcattgctgctgcttctttgggtgcttcatatgtagaattcgacgttcaactaacaaaggatcacgttccggtggtctaccatgactttcttgttgcagagtctggtgttgatattcctatgcattctctaactttagagcagtttatggatttgaacaacgccgataaacaccacattcatcattcttctggaaaagttaggagacgttcattggacgatacagatgcagcaattttgaggagatcaagattactgaaagaaagaggcccttcactaaaccatatagagagcgataagaaggatccaaccaacggtgctgctggaatatctaacaaagaggatagtacttcttctgaaattaatcctaagagtgtactcgaagaaaatgaccgttttggtaaaactgatgaaatctcaaggctctttgaagacagaatgcgcttaactaaaacttttaagaagaatgccttcaagggtaattccagaggtcattcaattgcatctaattttgtcaccttgaaagagctcttcaagaaaataccggagagtgtcggctttaatattgaatgtaaatatcccatgctagatgaagcggagtccgaggacatgggaactgtggttcttgaacttggacactgggttgatactgtgttaaaggttgtgtttgacaatgctaatggcagagatatcatcttctcctcgttcaatcctaacgtttgcgtaatgttatctttaaaacaaccaagcatcccaattctctttttaacggaagctggtacgactccgatggccgatattagagcaacctcgttgcagaatgctattagatttgccaaaaaatggaatttattaggtattgtgtcagctgcacaaccgattgtgaaggcaccaagattggcacaagtggtgaaatctagtggcttagtttgtgtcacatatggtgttgaaaataatgatccagacaatgctagaatcgagatggatgcaggagtagatgccgtgattgtggacagtgtattagcagtccgtaagggactcactaaagaaaataatgaaaaattgtaaaatagcataaacatatattcaataatgaacaactaaaattacttagtgttaaaatgatcgtcttagtgaatatctttgccaaatcatatttaatacgactttcttctttgtttctcttcggatgcttgttcagtttcaatcgagagtccgccagaaaataatcgtatgcatagatctacgtttgaatataccttatatttcacaatatcgggaagaacttacaatgtcctacaggaaatctggtcttcctctccttgcttaagaacacatacaatcatatcatagtgacagaaattcttctcgcggattgaggattagaagcaggctgtttagcaacatcatcgacaatgaattgattactgtgagttgcatcatgaacctgaccggaagaacccaatgcgtagccatgttccccactgtttttttcatcctctgcagccaattcatcaatttcatgtaggcagtcagtatcttggaaaatatcagctgctttcacctttgtttccggcgtttccgcaatcaattgcaacgtcttagtttttgcatcatcgttaatgtggtgatattcatctgggaatgctagaatgtttacctgcacacctttcaacgtcaaatatctgtctaacgtagcattgtttaaatgaataggaatgttagatacgatcaagctatgagacatggttgcaattgaaaaagacttcagtatcacttcgttgtgccaagaaaaccttttaactctgatggtttgatcttcgaatagataaaccataatcagaatcatgtaaaaaattaaagatcacagagagaataaaggggagcatataaaagcgtataatatatatatatatatatattctgagagagacctagcaacgacgtagttaactggaaattctgtttgtgaacgactgttctgcggtacctatctgtactgcagtcttttaagaattgagccgaaacaagaggacactatagacaaaaagaaaatagacaaaacgcagactccaatagaacgtaatctggaatttatcagatgaaatacccaccctaattcctttgtaacaaatgctctgatgtagctatttattacgttagttaccaagaaatacaactccgtgcacacattcttccttttttcttttgcactccatcccgtttccttgggaaacccaccctttaaaagtgtaccaactagcacaaaatcacagataactgatttctatcatgacatttcaccaaaatgcctggacatattgatcaggagaaatggatttaattcatccccttccttcttacaaagaagtagcgaaggagctagaacaaattagataagctattatatgaatatccaggctaggtagcagttgttacaagtgacccattaattgctccacccttatttcttttgcctttaccattacgacccgctatttttactccttttcacgttccttttcaaacgtgttttctacatactagctggagaagagcagtggggcaatgaagggccggggtcaagcagatgttactgttgatgtttttgtggctaatgggactttacctggtcagaaatagaccagagggaggaagttaaaatcgatatttgttgaaacggatcataaactatgatcgggtaactaccaatgtaataggcggttaagtatcaagatgatatgtaaggatttctagttgaaacaccattaaccaatctgaattattatataaggaggcattagatctggacaaggaccatcaacacagtcatgccagaaccccaggtgcatcaacatacattactagatatatagctaataaacactatggattcatcagatacaaaagatcttgaaataacaacacgtgactggtaataccagtatcaccaacaatattaatgggttatttatcagtcacgagactttagaaaggagttcatcaggaatgggatacgggttttatgattaaagatattcaatagatcattttagttgggattatttattgctcatttctgagcttcattatatatgtacaattttgggacggccttgaaagcggaagtctagctttatagtagagtttcaccaagagcacatcttgcaatggaacaaccagttgtgatagtatctaccacgtgaccatcgtgagaagccagttccgggttgcattctacgacatcaagggctactagcctaccagtttcagcgattctctctaccaagaacagcccttctcttaaagtcaacccacctcttactggagtaccagtggctggtacgtataatggatcgatagcatcgacatcgtaggaaaccatgattggttcatcaccgtttggtgcaactttttccaaagccatttcgatgactttgttcaaaccatatctgtctacgtgatacatggagtatgaggcaataccgttatccttcaaaatctttctttcagcggcatcgacgtctcttagaccgatgtaggcgatcttctttggatccaaacattttggaacccattttaaggatggaggagtgtttttagcatcaaggcccatcaagaaggagacaggacaaccgtgaatgttaccggattcagtagtagaacatgtgttgatatcagcatgagcgtcaatccataacaaaccagcatttgggtatttgtccaagacgccagccacggtaccgatagcgatcgagtgatcaccacctagggtcactgccaatctgccttcgttggaaaccttcttaacggattcgtagattagttttgtggcttctccaaccaaatttggtcttttcatgattccataaacatcagtttcatcattcttaccagattcgaaatctctaccttttagaggttcttcaagagtagtttcccaacctagagattcgatatctgatctcaaaccttgtttcattaagtatttaggaccattttcaacaccagattttggttgaccaccagagaatggagctagaacaataccaagcttcttttgttggaagaaatcaaaacgtggatcggatgacattatgtatttgtgttgtgcgtgttataataaaattctaaagatcactcaagaatacagtatgtatatcagtgaataacctcttttcgacttgctgagtattatatgaattgacgctaatcattggacatatgaaaagctgttatagaagtctaacttctctcgaagggaaactcggttctttatatacttgacgaaaaactataacgatcccattcagcgaaacatgttcgagaaaaaattcgcccctgttaattcataataatccgttaagtgcttgtgtataccgatgcttctcctcttcatctctttaccgttctcttgttcctgcacttaacgacaataaactttcctttgacgtattttaccgattttcctgataataatacatagttaaaaaacaaaaaaaaacaaccatatcctatataatgaatcgccaaacaatatgttggaggggacaattgctaagggtttcaggctagataaacgtttatgtgtgacattccatcacatgtagagatagaagaaagaacatgcctcgaaaattgctactttgacggcgattggacggcaggacgtgaaaagaggatgagtatcagaaaaaggaattgttctcatctcgagataagaatacatgtcagtcttgatttcgctctctttgggatcggtaattatcgcgctgctaagcttgacttgatgatctatgatataatagtttgtatgcagcatttcgttaagtgataaaactagcgaagatcgggtaacggagaaaaactaatgaacgtcattttttcatagttattgtgagcgatcattttgaagaggtatttcaagtcacgtgcacgatgcctatctatccaatgttggtaatgtcatccacaatagagcgctgagtatgtatcggtgatcaatctttttgccgcgtactggtaggagtattcaaagttcaaaatatcggctttttgacactaattccgagcatttggattatccagtaaacccttaaaggcttcgagccttcattttttttgttcccacagctcagttcaatccgttgatgacttcctttggtgtttaaactgcatagtctccaaaaattaaaaaaataaacccaaggaaaaatgtaaaacacagaaaatcttaaacaaaacaaatcaaagctgatgcagataactgacgagtcatagattattgcactatattaagagtatcctttacatatgccaatgctgcattaatcagtcgaaaaatatcccggcaataaatagagtcagcaaatttggttccttttcctagttcagtggtgaaagaaaaggatattactgtcttcagtcattctgttgtaatttctataatcatcttgatcctgaagaatcgactacttaaggacggtgatagctcataagaaaatcattggctcgtttacacaattcagaataagtcgatatgaatgacgatttttatagaccgcctaatatagcggatgtaagcatcgaaacggagggatttgaaatctcagcacggaatgattcaatgatgatacagaataattcacatacacctacaaagttgaataacttagaagtcactgttatttccagtgatggtggaagtagtggtactaatgccagtgaaaagaatggtacattatctctatcagcaggggaaagcacaatgggtgcaacgagtagggcggacagaactgtgcataattcctctaaacgtagtgacagtgttaagttgatcaaagttatgaacaaggttgatattttgaaagcagttttcgcgacactaacgggtaaagatcgtatagcgaaaatattcaaatatgtgatagatatactacgaattttcatacagaggtcaatgtattacaataataaagatatcgacgtggatgcttatctgaaattattttcaaaaggcaatctgctcacaatcctaaggaatccaaggctttcaggtaaactcttcttatctagctcttcgaaattatttctcgaaaagggtgctttggttagtagccagctaggtttctataggcaaatcatgagatgtgggggtaccccattcagactttaccattggtaccaaaagctcataagcactttctatgcgtcccaaaagtcatcaactttacattctaaaggtctagtttggtacaaaaattggtggaatgaggaatctctctcagagttcatcgacttatattacggaatcatggatgaattgatgctattatacaaacttaaactttggtctaataaatcgatgcatgcctgggtttctaaacacgaagctctctcatggtattacgacattatgctagggttgaagaaaaattgggagaaacttcaatcaatcaaacaacaggaatttgaattgaagatccagtatcaggtacgtcaacgcgcattggaactatcctcaaaattaaatgccaccccatctgttgattccaataagaatacagcacttataaaacagactatcttcgagagtttcaagcaggacaacctagatttagaactggaagtagtacaaaaactcaagaactaccagtatgagaaacgcattgtcaagtttgatctgactagactattctttgatttcctagctgatactacagatgtgttctctatcaaaacaccacctggtacatatgccattttgtctctatgctctggtgtacttggattctccaagctatggatacaggcgaaagagcaaccaaatgaatgagtaacataccctttgaaaatgtgtaccaaaaatttcttagtacatttccctgtataactcacaagtaacacaaagtatcaataagctacagacaggctatattttagtgacttttgcaatgctgcttaaaagaagtgctcaaagacatataactttacatgggtacctgattaagatccgatttggacggctttgcaagcgatattatataaattattctatgaattatatagtgtcagaaggttagagaataatgaattaacatcaataatgattaggagatatgaacataaacctctatgatagaaagtaggatagaatagaaaggaaaaaaaaatattaactttagaacctgaagtaaagagaaaaataatgcaaggagacggaactaatggaaatggataattaccattcactttctccctgggctttctggaaagcaaagtctttatggtctattgtcactacaccttcttttaaattacacttccacttatttttgactctcagcaccttgtcatatagacatagcatcatattgacatctgtgccctcatcctcgacgtccatgttgacatagtcgtcatcggagtcatccaaatcagaattgatttcatcggtttctaataacgcggatttcttggcttgctttgcttgtaatttcagctgtttagtcaaatctccatctggatcattcatagagaactctatttcttgttttggtttcatttcattatcttctatttgcagttcatcattattcaccatatctgaggacccattatttatattgctgccaatgatatctgcttcaccggcactagcagcagctccagaatgatttatggaattatcgttgaattcgccgtttggtagtttaaccacaggctcggcaactgttgatgcactggttgtattttctgggtcccaaatgaatgtggcggctttgctttcacttagtttcatctgccaaattcgtttgagatcttgcaatgtctgttcatccactcccgaatcttcaaattcttgtctgacatcgttgataacagtctcgagcacggtttcatatacctttgatgcctcgatattcgacatattggaaaagtacttgaagagtttcttctttctctaataataacaaaagaattaaagaccttattaagccgtttattctaaaagctattccgattccgacccggtactagaaattaaaataatccttcctttaatcgttaaactgaaatccttatataataggataccgtaagttaatttatagaggaggaacttcaatcaaagttccaaagtgttcagaaaatcagtttcaaaatatggagaacgatagcgcttttctctgaaaaaatatctattgcacagtttccacccaggtttagtgtccgcttcacaagtagttcagctactgatgcggctggtttccctctcctcattgacactccatataaggtattgttattattcagatttaattttccagtttccatttcactgaaaaaataataatatgaaattatatattacccggatatcacgtactcagcttaaatattcagtgttcgatatttatatggtaaacataggcatagtaaataaaaacagtaacaaagcttcattacgatcgataagtgtgttgtcacaaaaggccagatccatatcgtcggtgccacgatctgaagttcaatattgtattactgcttcaacgaaatcattgcaaagcaagacagacaccacttacatagtttcaaagaggtgctaaaattgaggttttgttgcgcatcctatcgtttctcggcggataagtgaagagaacacgagtacagcacctatggatttcggagataaacccaagctagagtttgctggctctggtgataagcttaactctcctataagattggttcctgatgagagcaacaaggaaaacgtacacgcattggaaagcgatgatcaacagagcgataaggagcagacctacaagagaagtaaaatagagtactcatccccagaaaagattgagatgcttaatagtttatctcctataaaaatagatatcgaaggaaatgatggaattgagtctgatttgaaaaaatcagtcgccacagccattgaagaagcagtgcaagatttcaaaaaggattcaaaagcggaagaagatgaagaagaggcattcggcaagttaaataatggatttcgtggttatcatgaatcctccactgcaaacgcttctggatcagctggttctgatgcaccacaacatgctcactgccatgagtcattgtcaccgataaggtcgtatggtgataaagagatgcctctcgacccatcagaccccacagtctgggagaagaagtttgatgatttatcatccgtaatatgggataaatatgaagagattaagtatctcaatgatactgtacagaacttacgagaaagaacagtagaagcggaatttaataaagagagagacaaattggaacttatcaaatgggagcagaaatatggcgacgtattatcaaaactgtataggagtgagcataaactcgaacagtttgatgaattgaaactccaatttgatagtgtcagcaaaaagttcgaagcctgcaaacaaaaattgaaagaggtcaaaatagagttatctatgacaaatcagaacaaccacattctatctgagaagttcgagaaagaatataccaaattcactgagaatgaaaacttggtcaatgaatggaaagataaacatgattctttactattggaacttaatgtgaagaccaaggaactcaagtcaattaccgatgagctacgctcgttaaaggaacaatatgaacgaaacgaaaacaagttgtctgaagttgaaagtgaaatacaggagctgcgtaagaaaatggaagaagagacaattgtattccaagacacaattaaacctagagatctaagtataaccgagctaaacaaaaaattacagcaatttgaagcaaatggttcagatgaagttagctctttgaaaagtaagctccaaatcactgaagcagaattagatagtaagaagaatgaaattgagtcattgaatttgaagctcagtacaaaggaaacagcattagaagagcttaggtcacatatcactcaggtcaccgaggataaagagaaatcattatctgagttagagcagaccaaaagggacttagactctcttacaagcagaaacggcaacatagaatccgaacatttagcagaactagaaagattacacgaaaatatgtcgcatatggaaactaatctgaagcaaaacgtcaaaactatcgctaatttaaatgaaactgtcaacaattttgagaataaatgtaaatcattggaagcagaaaatatcgatttgaaagcacgtctaacacagacagaaaccaatgttaacaaatcagaaacggatgaactccgagctaagatccagaaattggaaaaaatggttgcagattcagaagcagaaactaacaaaaagttgcaattattagctgaagatctttacatccaatactcttccaaacacgagcaaaaagtcaagatgctcaagaaagggtacgaagccaaataccaagacctgttggacaaactaacagtcgaaaataacgcattgcacgacgaagtggatcaattgcaaaaagcagtggaaatagagagagcggaaaaacaagagctaataaagtctcttgacaactaatgtgtgtgtatatgagtacgtacctattatagatcaaatatactccggagaaatctggttttcttactatcttctcttccattcgaacctttccggtggcaattatgtatttgctttcgttttgtttttccgttttccagagacaagttcccgacgcatgctctttccagtatgggacactcaattcgtgagcatttcgggatgttgtgttctgcgccgatctcagcctataatagccgcactttaccgaactactgatatcaaggatgactatggggaacaaatttctcgaatgaatgtatcctttactaatgacataacaatggattgattgataaataaaagtgcatcgcgtcctcttgtaattagcagtattttagttatcaatgaaaaacttttcgcctgcgaggagtaataagattgcatttctgaatgtggtgttgcaaatccgaatggcactttatcgcacttcaatcgaaccgcggtcatggaaataatgaatcatgaaaaataaaaagctaagctttgactgtgacagatttttggaggtacatttaatgaaaatatgactgctacatattagagaagaccatgatatgatgtttcatatataaactataaatacgtagtcttccctgacggaatgcatattctcacagaatattacaccattgtcacaagcattctacggctgatccggttgtcacagaaaatatcaattcgaaagacagtacagcgatagaatattgtaatgacaatgactaccaaattcaagattctcattcccagaaagaataagaacgatatcgcttctgactcagcagaattccaaagaattgcagaattagttgatttccaatattatgaattgaccaattctgaagatttcaagaaatttttactctcaagcaatatcgatgctctttggatcactgaagaaatgtttgtgtatttggaagctccatccacgtatttagactatttccctaaatcattgaaattgattttggttccatgggttggaacagatttctatgacgcgaaattgttgaaggaaaagtacggcatcagtttgtgtaatggcggtccagtggcatcagaaaacgtttctgatttggcagtgttcttgacattgagttgcttccgtttgacgtccttctgggagcactcattcaggtttgttcatagaggtagcatccaagaatgtcgaggatatatcggaggtacacaccatgatactattcctggatttgcgctggttgaaggtaacgatgacttgcataagacggtctctgcgcaacaaaagttcccaaaaaagcctgaaaacgacaagttcttgaaccttgcgaaggattataagatagcgggcaaagtaatggaatcaccaacagataagaatgcgttgattgttggttttggttccattggccaagctattggtaaaaaattgcatacaacttttaacatgaatatatcatacacaaaaagaaatggccctatcccagaatctgttctaggatataaggctaattatataccatccatggatgatgaagcgttctggagagacgctgatcttatagtactagcattacctggaactccagacacagaagatattattgataagactacattggaaaaatgtaaagacggtgtgcgtatcgtcaacgttggtcgtggatcttgtattaacgaagatgatttattagatgcattggatagtgggaaggtcatgtcagctggccttgacgtctacaaaaatgaatcggacgttgtggattcaagattcttcgaaagatgggatattaccttacttccacatattggctccacagtcatagaaatactccaaaggcagactgctgccacgttagagaatattgaaggattcttcttgaaaggaactggcacaaaatacccagttaactaatgttctgaatatcttcaaactggcgctggaaatgttggctaacaatgatggaaatattactaaaatgagatgaaaagtgtattgatactgcataaccaccttgatatcaaccactctttgagttttgaaggcctactcgttaaataataataaatccgaatatatactgcattacataatccaaggcggggatcaacattcattaattaactgctcccagcaggcgttctttctaagaacagagactgttggctggtcgattataacatctacaaaagatccaactcattattaccgccaactcgtaatatatccatctctgacagaagtcactaaacgcgttacaagccgtcttcccttcggcttcccttttatgtcaaggacattaaattttagaaaccgtgaaaaattgaatatcgcgtatcaaagaatatttttcataaaagctactttaatatcgtaacgtgtttatcattcaaatagcgtcgtgataacttgaaccctatttatcaaacagtacctagtatcagtatctgaggtctacggagtgatatattcttcaattttagattttgctggtaaagtttggggtacaatatatgaagagcttgaggatatcgttttatctttaagagtatacccaatcttttcacaatttagaccatcaggacaatacggtgggcagaaacagctctttctctgactctatcgcattgaatcctcatcgtcaggtctttgtatcattgaagatggagcaatttaatgactcccttaaagaaactacatcatcgactttaaagcttttggagcaatatgagaatcatattcaggagaaagacagaaatttagattacatagaaaaaggtgactcgaggtttacgaaagatcgcgaaacaggacctagttacgacgaatgttttaaagagaacgtgaaattgaggcttaaagtcgaagaatacgaaaaggaaatcaaactgttaaaggaactgatatctaaactcaaagagaatgctgtacctgtagtaaattatgaacaacagcgattagaagtagaaaccccgaaagatcccacattttcgttaccaccaagatcagcagatagaataagacatatgaaggacacttctgaacagagtcaggtcaacgtctacgatctaaagctgcctaggtcccctgccaccttccaattaaataaccaaaatttccaggaagaattaaagacaaacactcagttcgaaaaagcattgaaaaatgatcatgcgtacgagtcgacgccggcaactgctagtaccaaaaaggatccccaagatgcgggaaaagatagtttagcaacgacagggataccaaataatattctaggaagtccagctacttccgtgacttataccacatctcgaatatcgataaattccaattcaccgaatatcaacaataaaccccatttgaaaagacccaagtcaccagcaactttaccaaatggagctttatctccccagcgagcaaatcgtgtcacacacttgattaacaatgaacttcattctccattaaaagaccagttttcagatgtagataaagatttcgttgatgataccgcttccacgtctggcgatgatatcacagggagctttatacaaatgtctccagcagcccaaagaatcatcaaagaggatgagacaattatggagttctctccttcatccaagcagaatttgaataaatttactgacttgatcaataagacctttggggacgatgatagccaaatcaaaggaccccccgaaaaggaatctgcagctgcagtaagaccacctgtattcgatccgccgcttcctagggccgattcaaaagtactagcttctcctgttatgattcaaaacgcagcaaataatttaacaccttctgggctttcctttccgcagaaaactgacatttctactcatgacttactgaaaattgtctcacaagataacgtctcagcgatttcttcaagcacctcaatccataaatctttttcacccaaatctgtctcctcactttctcgtatccaaccaccaaatcaccacacttcatcaattgacatgggttctccttataatggagaagtaccgcaatccgacagtgttttacactcacccaacatcatatctgatatacctctatttgtacaaccagaagacttttcaacaatagctgtcgaagcttctagcactttgtacagtaatcctgaggatgcaagcaagtgtatactctgcagtgtcattgataagaaatcatctaaagagatgttcaagtttgcgaaatctctggaccagttatacgagcttgaccatatgttgaaaataaggctcatggagcaatatcatctcccggaactacctaaaaagcaactatttcagactactgttcctgttaaagtcgatttgagaagggagttattaacagattatttattagcactctttgaacttagtaacctatcaccagtgatgtctctaaaacttgcacaatttattagtacagataccgcaatctccgtaccaattggaatgactgacagcgtaaaagaaggggtacttttggtacgcaaaaataaggcgttgggtagcggtaattcttggaaagtacgacaagctgtaattgaggatcaaactttgttattattcgatcaagaaaatctagtggagagcatcaagttggtaagtagtacaattgaattacaagcgaatttacctgatgataagtacggcactaaaaatgggtttattttgaatgaaccaaagaagagcggtctttctagcacatccaggcattattttggcgctgaaaccgccaaacaacgagaagaatggatcagcgctcttataaaagtttgcagcaactccgttgcaaatatcaaagcagatactctttcttctgcccaagatcaaggaagtatcagcgatgcatcggtagatacaagcagcagtgctgcgattggaccaatggttaacctcgaaatgcttggtaaatctcaacaagtcgaacctgcaacaactgaaatggatagggaaaccaaaaggaatagaatgaggtcctttttcccattcaagaaaaatcaacctcagctttcaacttcttccttagatattactaaagaatcggacgaaacatctgctgaaaggtcttttgctagtgctctccatggcatgaacctacatgatgaggcaatttccaatgttgtatttggatccgacatcaaacactgcctaagcttgagttctagagtataccaaaacactcacgagataccaaccgttgtttacagatgtttggaatatttgtataagaacagagccataaatgaagaaggtatatttagattaagtggatcaagtgctttgataaaaaccctccaagaacaatttgataaagaatatgatgtaaatttatgcgaatacaacgcttcacatgagggcagtttgaagaatggtccctatctagatgtcaatacggttgcgggacttttaaaattatatttcagaaggttgcctcatctaatattcggtgatgacatgtacgaagagtgtagggtgattgctgaaagaaattcaggaaagccaactgaaactgcattgcagttcagagaattggtatcaaacaagagatttgaaatggaaaattattcattgatgtttgttttatttgagctattaatgaaaatcaatgaaaataacaaagtcaacaagatgaatcttcgcaatctatgcattgtgttttctccgactttgaacattcctgttaatatccttcagccttttgttgaagatttccaatgtattttcaatggaagtgatccagtaaacaatgacgatagacaaaatatcaatcttcagattcctcaaatgtaatataagttaagtaaactattgtactaattttaatgaacgaaaaggaaacgagaactatattacagaagaagataaaaaaccttccaaacaagcagtacaaggcaagcaattgagactattacttgctgttgtttatgcatggagttgagataattcgcacgaaaataaatatattattgtatagagaaggaaaaaaaggtatatacataggaaccgatagtaaatatgagggggggtatgatcagcttctagagaatgctaaattcttgctctactcctgcctcttagaacattttcaataaatgattcaccagctttataagaggatctaacaagcggaccagatgcacaatataggaaacctaactctaacgctttctgtttccaataatcgaatttttctggcgtgacgtactccacaaccttcatgtgtctctttgtgggtctcatatactgaccaaaagtgatgacatcacaaccgatggcacgaagatccttcatggtttgcaagacttgttcatccgtttcacctaagcctaacatgaccgaagtttttgttaccagagttggaacggttttcttggcgcattccaacacgctcaacgattgtctataagtggctcttctgtccctaacgtgtggtgtcaaagcttcaacggtttccatattatgtgcgtagacgtcaagtcccgagagagccatgactttaaccatttctaagtcacctctgaaatcaccagataatgtttcaaccaaaatattgggcgccttttgctttatcttctgaacagtttctgccaaatggtatgcaccaccatccacgagatcatctctatcaacggtagttaacacgacgtaacccagaccccatctcgaaatagcttctgcagtattctctggttctgtcggatccggtgctgaaggtttccgattagtcttcacggaacagaatctacaacctctggtacaagtatcacctaacaacatgattgttgctgttgcctttgacttatcaccaccaccccaacattctccgatgttgggacacttagcttcctcacaaacggtacttagtttcaactccttcacgtcgtttttcaacttatggaaatttgaacccttggcaatcggcacttttaaccaagttggtagcctttgcacttcttcactgttctgccttgccttttctaacggatctaaggtaaatttttgtgcattaccgttaacaaaatcttcaaaagagggccctttattcaacttatctgtgaaatgagtagtcttccttcttctagaaacagatggctgggtagaccttaccacagtttctgtaatgaaccgtttttgtaccgaacgaattcctggttttagcattatctttactattatattcgaatgtgtctttccaccaggcagcgttcagatcgttcccttatcccgagtttcaaaggtaataaaactccaaaagacacacacgcgagtccaaagttgcgatactacacagagagacaccaggcgcaagaaaaccttatcagagcaaatgtctatttctattccctatgttttctgtcaaattcatcgtatatgtcaattttacgtatatattatatataaaattaactcgaactagtggaaatatttcaaaatcacagcatcaaactccagcttcatcacatcgcttattccggttgaacaactggaaacgacatggggcagacaagtaaaaaaacaaaaacaaaaagacttggaacgagataatagcgtaatcaaaggtcacgtgaaagaataatcgttacccggattttattattatcccacgtccgggtgaagataagtattcgcgtgggttatgaggtaacgtaaaatcagagaagaggtagggtaatagagatagagatgatacgatatgagatataaggctctgatataatattgttcttacacaagaattaaataactatgttcaacgaaataacctccttataacaaaaaaacccaatgagagactaccttatatagcttgcggtatccctcttaacatataatgcaaaaatgatatttcattgtgacttagtttcgaaaagtaaatatatgatcagtgatagcagatgaaactactactctcaatctatttagtgcatgtgcaggaagaacctgaacagttacaggtagatgaggtagagccactgcatgaacaaccggaagaagacattgtaattgatttatttgtttgtgttttagtttctgaaacttatccgtttgtagagttttttaagttgaatgaatgggtgttcaaaatgctcaaagtagtttccagtgtgcaaagaagtactttaagggactcaaattgctctgttatatacgtttttctagtagatatgtttccatacgaatcaccagtttaacgggtgaaaagaagaaaagaaaaaagaaagtagtttcagtagtgtaaaaggggggaaggaagggattcataaaatgctctggtttcttctggagaattatttttttcgtcagcgtttatctcgcagaatttgtcctagaaggggcgttgggaaacgctgatgcgggaaaaccctaaaaatacaattcaaggcttaactaatggcactatgaaggaggaaagatgagaaaagacgaataaagaaacaacgaaaaaaaacaaagaactatcgcatagtgcgtttttttgctgactccttaaaaaccgaatgcgattttccatgcctcgctgagtcatgctattccagaagataaatctgtcaatgcaaaatgagcgatgttgatgatagggctattaaataaaaactggcgaaatagacccatccccacacatcactgaagttagagaatattgtacttcatactgaatattatggacactagagactcgctccagagggttagtagagttaacattgatcttgaactttttcgacttcctgctgtaattggtaatacttcgagttgagagtgaggagttggtttactaagtacatcatttaagatgatcccttcggcgtgatatagtactttatatgttggactggatattcatcatgtttggtagtagggtcttggcctagagggttagtagtattaatgtaattggatgccattctgacttgtaattgttaatgaaataaatggataattaaattggtgatcgactaattaagtaaattacttacggtgttctccttggtttcttacatctgacatataagttaatgtagaacagtaattcatatgtcgtcaaatcctgatgggaaaattggatgaagaaaccatctacttatatacttttcagattgggcttccaatcaccaaacgctgtagccttgatcctagttcctctcagcttcagcttcttatctagcattggttcaataactggcgtcttagaagtgctcgtacaactccagggaacaacactatatagaataacaggcgatgctatcaacgcgtcaaatgtaaaaattggatgaagaaactatctgggtgtgtgctttttgaagtttttgtaaatcaccacacccgctttagccttgaattcaattcaccttttttttttcagcttcataatcagcaatggttcaatgaatagcgtattaaggtttccggaatttgcacgggataatactaggtgttatatccttaatcttatcaacattggctccagccttacagcctctattaaatgaatgaggcacggcccataattttcaagatagtatttttttttattatatatggataaattatagaaaagattaattataagtaattatgctaatgtactcttaaagttacttcccgattaaagtggcgggctagagatcccgcacaacaaaaaacttgtcagataagttaacataaaaatctggacagaggtaaggtagaagatccggaatcagaggctaagatatagtattgttcatatatatctagatactaaatagccattattcaactcaacaatctctatgtttaaaaaactcatgagcgcatcatgtagtagcgagtgctcttcttaactatttcacaaaaaaatgtctcgaagtaaatacaagtttaggactagcagatgcgaattctacccaaatcctacttcctacatgtgcaaatagaacctgaacaatcgcaagcacatgtggtagatctcgaacagtcgcaggtacacaaggtacaaccactgcatgaacaaccgtaagaagacattgtaaccgatttatttgtttgtgttctagtttctgaaacttatctgtttgtagagtttctaagatgattagttttaaaagtgcttaagtagtttcaagtgggcagaggagtactctaaaggactcaaattgctctgttatatacgtttttatagtagatatgagttccattaatcatcagtttaaggaaataaaagggaaaaagaaagtagtttcccctcaattacatagtatgtaattgaagggagggcggagcatatgtactttaaccttcctattaattagtatatgaaataccagcggggagaaggaacggggtttttatgtgctctggtttttcccgatgaactattctgcgtcttatcatttctcctacaatcggcgttagaaaaatcaggtcgcgtggaagaaatcccgataagaaggattaaagttgaacaagccgcattatgaagaaggggcaagatgaataattaataacaataaaaacaaattatcactaaaagctttttcgccagcttgttagatatccgtcaatgcaatgtgatggtgttgatgttagggctattaacacgtacgacattaatacactattagttaaagcgtagatcatgacttcggagtttcattaccacctgttggagcccccgttcttcgaggacgatgacctggtctttgggcgtggcggagacccatgggatatcattgatatatcgctatcgtcaaagttcagtaaccttgagtgtctattgctgcgcaaatgacgtgttgttgtgtttgacggaatcttgtacccgcctacgttggatcccgtttcctgcgtcgaggaggaattgctggattcagagacgtttctgctgtttctctgatggctgttgacgggaactctggtacgtgcacgatgactttgaccgttgtcgccatgatgttcttgctcctgttcctcttcgtcttctttcgcttgtataatgtctaacgtttccaaatgtctcgagatatcgtcaattgtaatgtcttctacggttctattgaacgtcttgttcaattcctcatcgtaaatataatcttcgtcttcctcgttctcttcatcgctgggcagtatctgatcaacaaacggtacgttttcatcctttggttgttctgaaggcttttctctgcgcacaggagtaggagtctctgttcttgggatctcattctcatgcttgacaatcgtctcatggtacttggatctggtcagtctgacttctgggtgagtgacagtatcctctgtatcgaataacactttctcgaattctggaatcatactgcggccaagcatgatgacctcttcagcccagatccttattacgtcccgagctttctttgtcttgtatggcttccatcttggtttacaacctctgataatctccttaacaacttgttcagaaccccactcgctgatccaattctgattttggaacccaatcaagtgtgaaaagacaccagatgcaatggcaccgtccgaataaccaccttccatgactgaaatgatcttaccgttagaatgcatttgggccagttttaaagcatccttcgtaaatagattgtagaagcttgttgggacattgacattgtgcctttgcatagattgttgttcgtattcactggcatcaaatccagcactgatgacgacaagacctttgaacctaaacccaccttgcttcatttcaagttttgcgttcttgaaaaactcatcagccttggcaaagatagatctgtatttggtctgataaagtttgacaaactcttcttcgtctttatacgactgtagatgaacattccatatattgatatcatgcgcatccatgatacacgttgatgcgtttcgaatattttctttggtggcataaccaagttcagtggggaaagagttgatatcatgcaaggagaaataacctactttcggaaactcagcgaaggattttccaaattcatcgtacttgttatcatcttcagatgctccgtgttctgcatctgtggaaaattcgtctggtctaaatcctgcacgtttccaacaaatgtcttgagtaccatcaccatgatgtaaatcaaaatcaagaattacagcatgagtgacatcgtatttttcaaaagcgtattcgattgcgatatgtgcgttgtttaatagacagaatccagagggagtggatgcatgagaatgatgtcctggtggcctaatggcgataaatgctctatttgctgtctgctcaacactcacaccttggaaaatcgaatccacaccaatttctaaagctccgatagaaccctccaacgctgctatggtatgtttggaaagataaatatcaccgacattccaatcagggggtacctctacttcttcgttatcaatttttttctcagactctttacagagcttcaaaagttctcgcggccaatctttcccatgaactttcaacacatgaggtgctaataacgaagtcttgtggtgatttgatgtcttcacagaaaacaaagccggatacatcgtaatggctgcagataccccaatacaacatgctaataatctctctggtctttctacaatagtttttttgtatgacttggatacccaataacgggggaactgatgtgataaagaatatggtgataaaactattacggctttagatgattcagggatcctcgaggcagaagatgtcacggaagaaacattagggttgctagccacaaatttttcgaactgaaccttaaaattatgtaacggatcttgagacattgcttccaggtctgtggttggcttagcaatcagattagtttcagtcctcgtaaataaagaacttttcgaagttctcaagtaatgcgaaataaagaattcaaaaacctataaccctcaatacaacacgcaactcaatggcagacggactcttaaagtagttggaagtttgaatctgagagcaactaatacttctttacctaataaagataaacccaaagatcactcactgcagatatgcgtgctaaatatgcaattataaatatatcggcattcttcagggttgtggtgtatttgtttgttgtttgctttgatttttaaaggtttttcgctgaaaagtatagcagttgaggattcgatctcaaaatagtaaacaaagaaaactgatccaatgagaattgaatgatccgtcgcaactgactagcgttagtgttcagtaaggggccagaaactttgtttacactagtgcattgtattcagcctgattgaggctgtatatgatacagtacattctttgctcattttatcttatctgttatttatcggtgagtaactaaaagggtacgaaattgaaatctctcggagtcctgtaagtttaccacagacaaaaatatgatctcgattgaaattcgaacccaaaacttattcttgtatttcttgaggtgttgtcattacatatcttattgtgttttcgcgtttggcataaactctaaacagtttgctgcacatatatatgtatgttacaaagtctcggcttttactgttcgaactttgggtggcagcgcaagtaacataaaacagggtctaagccatctttaagacatttgaacggcaaacgaaaggcaacggtacattgtcaacaaatttattagtaccttgaagcatgctttcttcatgatttcgcctatttccctttttaccttctatgcatatgtatttcgaaagactgtgttcacaaggattttatacaacaaagaagatatctttcatttgaaagaagaatgatgagactttgccctgaagaaagcaagcataataagctgaaatcaatctgcagctgcagttcagcaatgtatccaggtcgtgccaaaccaacatataacaaccagcaagctcaacaggctcaaagccaagttggatatcaaactggctactcgaatgctcagcctcaacagcagtattatacggctcctcaacaacaaaatgtcagtggttcgtcaatgtccttccaacaccagttctaccctcctcctaaccaaagcccgccacaatataacactggtcagtacgccagacctgctgccccacctccaggccaacagaattacagaaatgatattcaacagaatcatgcttcaggtactgtgaatggtccttctgggtaccaacagccacaggctatgtataaacctccttctcaggttcagcacactgggccaaacaaccaagttgcgtaccaatactcccagtgtactggtagacgcaaagctctattaattggtattaattattttggttctgcgaacgaattgcgtggttgtatcaatgactcccataacatgttcaatttcttgactcaaaggtatggttacaaagccgaggatatagttatgctaaatgatgatactaccgaccctgtgagagttcctacgaaagccaatatgctgagggctatgcaatggttagttaaggacgcaagacctaatgatgcattgtttttccattattctggccatggtggacaaacggaagatcttgacggtgatgaagaggatggaatggatgacgttatataccctgttgacttccaaatggctggtcatattgttgatgatgatatgcatgcgatcatggtttctcctttgcagcccggtgtgagattaactgcattatttgattcgtgccattctggtacagtattagatttgccatacacttactcgacaaaaggtgtgataaaagaacctaacatgtggaaggacgttggttctagtggtttacaggctgctatggcatacgctactggtaatacaaccagtttggtcagttctttaggaaatgtattcaccaccatcaccaagtccaataataacgtcgacagagaaagagttaagcaaataaaattctcgccagctgatgtcatcatgtttagtggttcaaaagataatcaaacgtcggctgatgctactgaaaatggtcaaaacactggtgcaatgtcctgggctttcttaacagtactatcaaaacaacctcaacagtcctacttaagcttattgcaaaatatgagagccgagttaagtagcaaatacactcaaaagccccaattatcttgttcgcatgaaatcgataccaatcttcagttcctactatgatattggagtcttaatcttattgcaatcaagtatacgatggtattataacgtgctttctttaaaagattatataagaatatccaaacataaacctacatataatcaattcagtttctgtttaagatgctaatataatttagaagtcatgggggtcattttgttatgaggacactccagatgaaacattttaatcttttccagccgataagttttaatatgtacttgaaatacaagaatgaaaaaggcaagcagtggacaacagaaaaaaataagtctcgtatctacatcagttaagcttcagttgggacagcggcatcagcggcagcagcgtcctccttttccttttgttccttcaattttttggcttcaatttcttccttaactttctgttctttagcttcgtactctaagttaagtttcttgagctgttcttcagcttctgcaatgttcttttcagtagcttctggttgcttggcagtcaagtcctcatgcttagccttcaactgttcaacagtggctggaacatcgcccttggataatggtactctgatatctaattcggccaacaaggcgatcatggatggctctagagagaactttgtagattgcgccttcttcttgtgtttctttgatttggaagcggttgaagcggagaagaatccttctctttccttaacgattggcactaacccttcagaatcaacagtcttagttggggtggcagtttgttgagatgtgctaccgaaatcgatacccaagacgttcttcactggcttaacgtaagttggatccaaaacagtcaacatattctcaatggattccaattcgaaggtgaaagcaggctgtttggcatggtttagtctttcttgtagcttgcccactttttcttccttatcttctaagatcttggatagtttttcgtcttcttcacgtttcaaacgctgctcatccaacttcttcttgaatgacttgaattcgttgtcgaaatcacctctgatcttcctaatttgagtgtagatttcgtcacgcttgttgtacaaggcagaacgcttagtgattaaagtctttctcttgtcgtaaacaacttggttcttagagtttaagttattgatctgaccttggatagtttcgaactttgcggcaacctccttcgggttagaagcgttcaattccttcttcaaagcatcaatttgttctttctcttcttcgatagattttctaattggttccacaacttggaaatctttggacaatttgtgcaaactttgcatttccttgactcttaacctttcctccaccaaggataagtcaccagaagcgatttcatcgtcaatttcagccaatctttgcttgatttgaccaacattttggaacttcttgttcttaccgaccaaatcgttgatctcaccagatttacgtttgatttgagcatccaagaacttaatctggtcatggatttgttgtctcttagccttcaagtccgattgagttttgatcacttccttcaattcaccttgcagcttttcctttgaattcttagcatctttggagaaatcggtattatcaatttgttgcttgatcaatgataattcttgatcaatcttcttcaactgaacattcaatggctctagcttcttgtctctgacagtaacatcaggtttctgaatatgttgttttggtctagcagtggacatccttgtaatatattattattctatggttattcacttggtcacctggaactagcaactgaaacaagtaacacaaaacagactggtggaaaaggttacagttaaaaagaaaactttaagtatagaaatggtaacttaataacactaattgaactgaaaaaatactgtctcaattaacgtatctcaaacacaacctttgtagatcaagaatttgattctgttcaagaatctgaaatttttaacacgtttgaataatttttcaacgttcaattaaaaaaatatcgaatctttcccaaaagctttttttttctggaagacaccacgaatcttcttacagatcaacagtgctctcagacggatcggaccttttgtgtgtattattccctccggaacatgacaaagcttgagcttcaatctgggtagacaatatattctggtcatttacaaattttcgtttactacacagcttctcatccttctaattaagtttcctactcttccattgtaatacgtaggtgatcctcagcgacaatttccggttactgtcgtttgagatttttctatattaaataaaactgggacatttctctcacagtgtgttagttcattgcaaagcttcaacaaatggaataagaaatggacaacagcagcagcctactgtgtcactattggtagcatctcgaatcgcgtgtctttcgtataaaagtttccattatttggccgataccgaaatgcaaacaaaaaaaaaattagatttaacgaacaatttaaaagaagaaaagttgagctcattctgctttaaagaatcttcgaaaaccatcttgcggaataaagctaagcgtatgcatcctgtaggacgtgcaggaatttcaaactgaaccttcacttagcggaccaacagaagagatgtcaactcaaacttctacctatgcggaccttgtgcattcattagaacaagatgacatcttagaaaagtttcctgaggtcatcccattgaacaacagaccaaatacacattctactgaatcctctggcgaaacggataatttgctagatggatatgatgaggaacaaatcagattgatgaatgaaaattgtatagttttggattggaacgatactgcgattggtgctggtacaaaaaaactatgtcatttgatggagaacatcaaccaaggtctattacatcgcgcattttctgtgttcctttttgacagcgatggtaaattactattacaacaacgtgccactgaaaagattacttttgcagatctttggaccaacacatgctgttcacaccctttgtgcgtcgatgacgaacttggactgaacggctctttggaaagtaaaatagagggtgccagaactgcagcagttagaaaattggaacatgaactaggtatcccaccacaagaggttgaatctaaaggagaattccactttttgaaccgtattcattacatggctccaagcgatggtgcttggggagaacacgaaattgattatatattcatctatcaattgagaaaaggagagactctgaccgtcgagccaagcactaatgaagtaagagatattgcttgggtatctcaagaagaattaaagcaaatgttcgcagatggtaacctaaaattcactccatggttcaaattaatttgtgacaattatctattccaatggtggaatcaattaaatgatttgaacaaagtcgaaaatgataccaaaattcacagaatgatgtaaaaacaaaacaaaagttgaattccggaaacattgtacattgactcatctattgaatgagatattccctattaaacgaaaagttcacctggcagatattccctttccgcttctctacacctaatgattgcaattaattttggtttattctatttacatgaataatatttcagaaaaatgtccagtaatccagtatatatctatatgtatagtgcaaaactctttctttcaatttaagaaaccattaattagtagagcagtagcaacactaacgttcaatgagtcaatagtgtttcgtccctcggttgggtctctcccaaaaggaatctctacagtgaaatcacttctgttcagtaggtttgttctaacaccgtttccttcattaccaacaaccaaaactactggtagctcgttcagcatgccacttaattcattcattgttaagtgatttcctttctgtgaaatgctcatatgtgaagtaacaaacatccatcctccatcctgtttggatttttcaaagaactgcaagggtttagcggtggtaaatataggtaatagttccattgtaccactactgacttttgagaccactggagacaatggcgcacaattcttgtgtgagagaaccataaaatccgctcctaagaaatatgcacttctgatgatggcaccgacgttatgagggtcgacaacttcatctaagtatattcccagtgggtttttcttattatcattagtcatgaacttctctctagtgtttactgcttgatcataatcaatttcgctcttgtcgaatgtacatgcttcatggtttaccaacccaagatgagataattcaggaggctggagtggtttacattcgagaaccacattattatgcacagcataattagtgtatagattaagcctatgtttatctacctcttcagtctgaatattatttttcgaacacaacgattgaatctgtgtattcaatggtccgtaatgatgcaactttacgaaatattctctcttcttcgcagttaaggcactaattacactgttggtaccaaaaacgtaatcaaccaacgggttaggctttaaaccttgtaaagggtgcattttagtatactctgacctatgacttctaaactgttcccttttggacgattcttcttgtttgatccgatcgtaatactttttcttcttatcgaatgggtcacttcctccgttattcagccttgcatttttttctcttgcatgaacatgtgcgtaatttttcctgaaccatttatctttatccattccatctttctcccaagccttagtcctcttatgcactggaaagttccgatcgaacgttacttttctgtccttaatatacgattcgttaggcactttgaccgcagaacgaatcttgttcgaataacttcttgtgatgtttctgagcatgctatactaccaatggttttactttatttgagtctgctatgctcttgttaacagataatgtatcttttattccatgcctctcagctcatctcatctcggcaattttttgttatcaaatagcttaatctgaaaaatttcagaaagtcaagtttcaagcttttctttatttgtaaaatattccagaagatgattcatttctttatcgtagtagattgacagaagcgtaaaggtatattggaagaagaaagaaagtaactggcctcaacattagtttgtgtacttataagaagcctaaaagttgctaccatcgttcatatttggcacattttgtaagaattcctcgagaaagaactgtcaaccaaaaatgacttatccggaaagaaaagcttttgtttctagaataacgaatgaaaccaagattcaaattgccatttcattgaatggtggaccaatttctattgagaactctattttacaaagggaggaatccgatgctgctaagcaggtaactggatcccaaatcattgatattcagacaggcgttgggtttttagatcacatgattcatgctcttgcgaagcattcaggctggtctttgattgttgaatgtattggagatttgcatatcgatgaccatcataccaccgaggattgtggtattgctcttggccaagcctttaaggaagctttgggtcatgttcgtggtgtgaaaagatttggttcaggatatgcaccattagacgaagctttatcacgtgctgttgtggatctatccaatagaccatacgcagtaatagagttggggttgaagagggaaaagatcggtgacctttcatgcgagatgatacctcatttcttggagtcctttgctgaagccgcgagaataactttgcacgttgattgtttgagaggctttaacgaccatcacagaagtgaatctgcattcaaagcacttgccattgcaatcaaagaggctatttcaagcaacggaaccaacgacgttccttctactaagggtgttctaatgtaaaattccttttcaagaaaggagtggactctcattgcatatgcgcgacattcattttaagtttacatcaaatatatattcatccattttgttccatttaagttacgagcacggcccttaaccgcttgacgcacagctccgtcttccgcgtaacatgactgtatttattacgttttatttacaagtgacttctagctatggttgtgtaatacctaccatatatcaacttacatggttgtctttaataagtttaggaactcttcactttgagatctagattcttcggcggtgacagatcttacagtttttcttgaagagtttctggaatcggatctggtataatgtgatctgctttgacctaagccgatcttctgagcaaaactgaagtcatttcttggttctactaaagatgcagacaatgttacattacccccttctacctttggatcttcaatggcaaatggtaaaacttcttgtctgacaaaatcacccatgttgtattgtagagcacgaggattacggcccacagatttagcttcagcgatgaaaccaccaacagcgactgcgcgatcaggtccctggacagataaaactctgcctggcacaacgtgcttttgttttacaccatttggagattgtctaagtctacctttcaagttgtaagttagaccaccggtgcccacaatgtgccactccgagttagctgctgtattaatattcaactttcccatcttttcatgtaagaattcagtagctaaagccttcaaaggtctggtgttttcatttctaacaccagcaatggaatccgggtgtttctctaacagccacttcttgaattctgatctgtgttggtcaatttctttcaactttcttgtcttttcagaaggcgcagtgttatgagcaatgttcacagcattgctgaatggcgcgtattttccggccctcttggttttcccattgaatagaggattggattcttcttcaacgtaacgaggggctaaccccatttcttggaatctgattctgttccactggtattgacccattggttcaaaagtcgttagtctttgttgggtgtccaaatcgttgtaaaccaaatatctggtcttgattttcgatggaatgcttgccttcaaaccccattcctgacgatataaggaggatggcttggtctcaatcacttgatgagttggatgagaagagttacctggacgaaacaatggcttgtccgtctttgccacttgtgctatcctggaattttttaacaaattagatatatgggacatagctttctatttcgaattgtgaattcagtaagtatatctgtcttcaagctaaggactaacagcccagtttaaacccaaaaagtgaattatctattcaacgaattgctgatagttttggaaccttgtcacaatagtcgacgataggaactaatttagctcttcagtcaaaatcagtagctgagctgtgtttaagatttatcgaattgaatgctattcaatgatatcgaaatttttttatcattagaaacgtaacattttacccggacttgcgacagaccattgatgaaagtgtcacatttagtactcattttaaaggaagaatggtttcttaagtgatgctaatatttaaaacgagatcagcaccagtataacataagtcttctatgaggggtttcccataatcagaaatcggtgttgagtttaaatttttttttcaattgcattatttattatattgtttactacagaaaactattcattttttcgtaataatttcatatcaacagttccttggtttagtcgatactgtatgagaacctcagtttcgtagaaatgtttgtactacttgacaaggttatcagatagtttcgagcacatgtctccgctatccagaagctcaacaaaaactgatttttttccagtaacctcatcaacacagtagatgtcacgatcggtctgaatgtcaatctcaggtgctctaataaaaggtttccagttccctgtgtaagctttatgaccaaggtaaagtacgatggtaattggaacagccatataattttgaaggaatgagacgacattcagcctaccgttggattctaaaggaaacaatgatacccaaaattgtactatcaaaataatggcacaaataaacaacgagatgtaactgccatatacaccacatggtgattgatatcctaattggtctaaagcttgatcttgatctttcattgcctttctgaatctcaaatgagacacacaggtcatactccaagtaaagatagtggaaagaccgctgattgacaataaccaaacgaagactgtttcctggtccttatattcggctatgaatgaaaataaaccagtaaatgctgaaacgcaaagacatctaaacggcttaccactttcatccaatttacaaaaatatttcatcgcaaatccttgttcagctaaggaatgtaatgttcttgagctactatacatcgcattgtttgcgacagaaataatagacaatagaataattgcattaacaatatgaggtattatcctaacaccattggttgttaatgcgaccacatatggagatgcatgggtcagttctgatccagaccccatcaaatatggggaattaaagggcactaataatccaataatcatcaaagaaacgcaaaaaatgatggcaattcgtacaacaacttgtattgacgcccttttaatacttcttggcatgtcttctgtattctgttcagcacaactcaaggcgacaaactcggtaccaccggtactaaagcaggcagttatcaacgttgcagcaattgacttgaaaagcccctcatcgtttctaaagaaccctggactatggaaatatttgaaacccaaatatccgctagtgccgacaacaccagtgttaacgaaaatacctaaaattatgaacccaaggatcataagcactttcaaacagttgaaaatgcaatcagcgtccgcataacaccttgcaccaaagaaattcaccccgcataccaaggaataacataatgcaacaacgatagaaggattgatattttcgttccaaaagttgatagtcatagaagcgacacatatttctaatggcaaaacgacagtccaatttagaaaaaataaccaagaaatggtaaagcccacagacgggtctatgaaacgctttccataagatgtaaacccaccaggcatacttggaaaagcaacaacaagctcaccaacagtttgcatgcaacatgtcaacataataccaataattaagtaaccaactaaagtaccaccaacccccgcaatagcaattgatctaccgttccccactaataaaccggtcccaatacctgttgcagtagacatcatgaaaacatgaaacggtttaattgactgttttaactcatttttgggaagagtaacatcagctgtagtatcgatactgttcgttcttgtgggatctgagaggttggaaaaagttgcaacttcttttaaacattcttcagtcattttttaataattgactgttcagcgaattagtgctgtgattgatgaatgtctattactcaggatgaagtggagagtagcagggaacaggacgcatcctcgaaagctagtttttttatataagaagtgataaatctgacacgcaccccgctcctggcagatttaatcatccatatccgttatgaaactccttctaacacaatttctgaattttttagcattacagagctgatctaataccataaactcaattgaaacctgttgaaatgcaccatttcctgaatactctttgacatatcacaacacttttttttctcttaaagcttgaaaaaaaactgtcgcacgtcagaaacgctgtttgcctgatatgaaagtttaatacgtaaatgatacaaagtctacaatgtgttgttcaactctcagagatacccgctcagagaaaaatacaatagccaactgatccttcttcacaatctaattaaaaatacgttaacctggaataacctgcaatgtaagccgatcttctaatcgttaaacatgactaactcccaggcacgttacatacagagaactaaacaaaaatgcatctagaataatgagggaaaggaaaaatttttcgcacattaaaacgcagagcccaaaaagcgtgaaaatttgtgaaaaagaaatgagtattttaactgggaaagaaaagaaggaatataatacagaaaaaaaaattgaattgaaggaagagatacgttttagtagttacttttgttcagttccatcctttgtactgtttacagacaggttaaattattttgtattctatatataaaagttttcatatactttcagttcttacttacagttctccagacttacttctcattaaagatatacatcttaagaaatactttcaatcttattagaagatagatagacggagaatacgaatcaagaagaagataaaagtaaagagacaataaatttattaatcatgtctgatattgcggaaaacatgtctaatttgtctgttcaggacaatgattctggtgcaacttcaggtgacagcagacgttcttatgttcctcctcatgtgagaggccaacaaagaagtggtagcggtaactatcgtggtcgttctgataacttcggtggtaacgagagatccttctttggtaacgaaagaagaggcggtggatacagcagaggcggtagaggttccgtcaactggggtggttccaactggggtggcagaaacgacagtagaggttctggcggttacggtggtggtaactcatctggtagatggatcgacggtaagcacgtcccagctgccaagaacgctaacttggaattagagttgttcggtgttgctgaggacaagagtttccaatcctctggtatcaacttcgataactacgacgatattccagtcgaagcctctggtaatgatgttccagaaccaatcagtgaattccactctcctccattggatcctttgttattggacaatattaagttggccagattcaccaagccaactccagttcaaaaatactctgttccaatcgtcgctgctggtagagatttaatggcttgtgctcaaactggttccggtaagactggtggtttcttgttcccagttctgtctgaatcattctccagtggtccagcctcaaccccagaagctgccggtaactcttacatcaagaaggtttacccaaccgccgtgatcttggccccaaccagagaattggctactcaaatttacgatgaagctaaaaagttcacttacagatcgtgggttaaacctatggtcgtttacggtggtgccagtatcgacaaccaaattaaacaaatgagatacggttgcaacttgttggttgccactccaggtcgtttgactgatttattggaacgtcgttacatctctcttgccaacgttaagtacttggttttggatgaagctgatagaatgttggatatgggtttcgaacctcaaatcaggagaattgtggaaggttctgacatgccatctgttgataacagacaaacattaatgttttccgccactttcccaagtgaaatccaacatttggcttccgatttcttgaaggactacgttttcttgtccgttggtagagttggttctacatccgaaaatattacccaaaagattctttacgttgaagacttcgacaagaacgatactttgttggacttgttggccgctagtaatgaaggtttgaccttgattttcgttgaaactaagagagccgcagattccttgactgacttcttgatcatggaaggtttcaaggctactgctatccatggtgaccgtacacaaggtgaacgtgaacgtgcgttgtctgctttcaagaccggtagagctactatcttggttgctaccgctgtcgctgctagaggtttggatattccaaacgttactcatgttatcaactttgacttgccaaatgatatcgatgattacgtccacagaattggtagaactggtcgtgccggtaacaccggtgttgctactaccttctttaaccgtggtaacaagaatgtcgctaaggaattggttagtttgttgagtgaagctaatcaagaggttccatccttcttgaccaccatcatgagagaagcttctagcggcagaggcggtgccagaggtggccgtggtggttacaaccgtggcaacagcaccagagatttccgtcgcggtggcgccccctctggtggcttcagcagcggtggcggttccagcggcggctggggtaacggtggcggctccagcggtggctggggtaactcttccggtaactggggtaactcttctaactcctcaaactctaactctggttggtggtaaatcatcacattcaaagcttattttcctatcatctttttgaaaatatatttttgatcgctgagtacgcactcattttttttaattaatcctcagcatctgctttttcctttattgctttgaattatttggtgttttctcttttattgttttcacaaccgtattatgcaattgtacactagtattacgttctggttttcagagatttgtttctcttagaaggtcgaaacctgaaactcatttttttccaatattttattatattcaccccgattgacatttgcttgtgtattctgatggaataatgttgatcattaccattccgagaatattcatgatagaaaatggtttttatcctatttcatccataactgaaacttatttcacatcaaactcatttttgttactattatttatcatggatttgaattcattcaacttttttttattgttttaacgcataactatagagtgatacgtttgtgtttcgttgtcgcttgtaatcacttggtattcattaatattctttcttaccaaaactatactttcccgttttcgacaacgacacacaaggctctatgaatggattatattgtattttgtgtcaatttttccgtttttcctttttaaattgtatatgcaagcaatggtagaattgtataatagatcatgtttatagataaaacactgaataaggctttactaattataacttttttgtttcttaaattacttaaaatgaaatactattcaaatagatgagatacttgatattaaaatatatcccgttaatgttcacacgttggtatcatgcttgtcaacatagttcaatggcagtaaccataaatgtgggatgcaataagctacttatcaaaatttcttctgtggaagtctagcacctgtgaattgccttcagttgacacaaagaacatcttcttcttctcgttttgccagagtagtacaccaatatcctttgcataatctgctacagtttggtattcttggtaggactcgaaatctgtgtatagatatccatcgtaacttatgattctatccaactcaagttgccacaatcgtatttggtcaacaacggttggaggtaaaacctgaagggtctccttcacggtggggtctaactctaattttttactcaaattctcttctgccaatcgcctcattctcgggtgagcatgagtttcaaggtatgctataatttgttctgcagtaataccattcaataaagcatttcttacagattctctcgtaagctgtccagtcaccatattcgcaaatcttgattttagatggacaaatagcgatagaatagcaatttgcaatggggagttagaatatgaatatagtttgaagttagtctctataatcaaggcaccgtcttgagttcgctctgtagtttcatcttgtccactgtctccttctacagctgttgtttcattagctttatttaacacgctgtctagagcgactgaggcacttctgaatgcttttgtgtcggacgtcaacaacgtggctaatctggtaggataaaactttgcataatccgattgattttgatagattaatccgtaatctctcatatcctgtaacattgttctctgcgtattacttagttgatcgcacttatacgccttccctagctgtaatgcacctagcatgaaaatgaaatttagaacatccacgggatccatctgtaaactttctgccatcttcaaatattgaagaagaagagtccacatctgtgcattgacatcttgcaagagaaattggaaaccttggttagtaattttgagttcgccatattctgcctcttccattagaccactatgctgcaataagtctagaacctttccaccaggagtgtttgtattcggtgttcccaccatgtaatgcaagattgtttcccacttttctgcactatactggtccaaagtagctgtagatacgggattggtatcatcatccgcaacatcaccaaaagagttattgatttcaccaccagttaatacatttttgaaagatttcttgaaaattggattcaaacgaatcaatagaggttgtttactctcaccttctattataagattcaaggatttcatcgatttaatagagtattgtaactggtatttcgcatctggcttgacccatttatctaaatctctaagcgagacatcgtggtcctgaaacagcatcgacataatgaagaattttgccatgggagaaagcaatctataaattgccaaacatgtcgctggagactcatataatcttgattggacttgctctggaagaccttctaggtagtcattaacggtggtcttgaaaagattcagactcatagtattgaaaatatgcagctcaaggcctcttgaaatagcaagagattagaaccaagtgaggagatcaacaatttggtcacgtcaatcgataatgttatttcagcctaatacgatttgctgcattcgaacgatgcaatgcatccatgatatccgatttggaaaagctcatctgaatcaatagtacttaaggttgataccatgtcaaatccagacattcgcatattgaaagtaaaatatatgtcacgtgtatatatatcatgtaacacgaagaaatgtatcttgcacgtgactgaaaatttgttgatgacagaagaaatttcttttcactctgtcagatcaattttggaaaatgaaaaagatcaaatcaagctcatctcgaatttgaaataatcgaaatacgccaatgattaatgtagatgagctctgtcaatattgatggaaacaaagagaagtgcatttattggcagttagtgactgtactgatttgctgacctcaacaaagatttgattaagtgaaatttactggttggctccttcttttttcactttcagtagagtagctttgtttggtctttttgcctcttttctagatattttgtttgattaactgtttggaacactaattaagtttggaaagggtagctttcaaatatcctgattgaatattctctaaaatgaaccacactgactcccataatcctgatggctatgaaaaagatgaagcgttcgatgctcttttgaaacccgtcttcaaaggtaaaaagctgactgacgagatcaacactgccgaagataaatggaatcttttgcctgcctttttaaaggtgaaagggttagtaaagcagcatttggactcttttaattactttgtggatgttgatttgaagaagatcatcaaagctaatgaggttatattatctgatgtcgatccagagttttacttgaagtacattgacattagagtaggatacaaacataacggcaacaaagctattatgaccccaccacatgaatgtagattacgagacatgacatacagtactcctatctttgttgatattgaatacaccagaggaagatcaattgtgttgcatagagatgtggagatcggtagaatgcccataatgttgagatcaaacaaatgtatattagatggtgcagcagaaaatgatatggccaaattaaatgaatgtcccttagatccaggtggatatttcattgttaatggtactgaaaaagtcatcttagttcaagaacaattatctaagaatcgtatcattgtggaagcagatgagaagaaaaacatcgtacaagcttctgttacatcttccacccacgaaagaaaatctaagacttacgtagtcaccaagaatgataaaatatacttaaaacataactctatcgcagaagaggttccaattgtagttgttttgaaggcttgtggtgttgtatctgatttagaaatcatgcagttagtttgtggtaatgatagcagttatcaagatatcttcgcggtgaatctcgaagaagctgccgaactaaaaatatacacgcaacaacaagccttagaattcattggtactaaagttaaaactgtcagaagacagaaactttccatcttgcaagaaggtatcgaggccatcgctacgacagtcattgctcatctgacagtggaagctttagactttagagaaaaagcattatacattgcaatgatgactcgtagagtcgtaatggctatagataacccaaagatggttgatgacagagattatgttggtaacaagcgtttagaattggctggtcaattgatgtcattgttatttgaagatttattcaaaaagttcaataatgatttcaaggcaaacatcgataaagtcttaaagaaaccaaatcgtgctgaaatgtatgatgccttactaaccattaacgtacattccaacaacattactacaggtatgaatcgtgcaatttcaactggtaactggtctttgaaacgtttcaagatggaaagagcaggtgttacacatgtcttatccagactttcttatatttcagcattaggtatgatgacaagaatatcctctcaatttgagaaatctagaaaagtttcaggtcctagagccctacaaccttctcaatttggtatgttatgtacctcagatactccagaaggtgaggcctgtggtttggttaaaaatttggcattaatgacccatatcaccaccgatgatgaagaagagcctataaagaggatttgttacttgttgggtgtggaagacataagtttaattgacagtgcttcaattcatttaaattatggtgtctacttaaacggtacaatcatagggacaactagatttcctacaaagtttgtgtctcaattcagatgtttaagaagaactggtagagcgtcagagttcatctctatatataccaatacacatcaaaaagcagttcatattgctactgatggaggaagaatctgtaggccgttgataattgtttcgaacgggcagtcttctgttactgcagaccatttaagatctcttctggctggaaaattacaattcgatgatttcttaaaactgggtttagtcgagtatctcgacgttaatgaagaaaacgactcgttcattgcattatatgaaaaagatctatctgagaatattacgcatctagaaattgaatcatttactgtcttaggtgcagttgctggtttgattccatatcctcaccataatcagtctccacgtaacacttatcaatgtgcgatgggtaagcaggctattggtgcaattgcatacaatcaattcaaaagaattgacaccttattgtatctaatgatataccctcaacagcctatggtgaaaaccaaaacgattgaattgatcgattacgataaacttccggcaggtcaaaatgctacggtggcagttatgtcctactccggttatgatatcgaggatgcgttagttttaaataaagcgtccattgacagaggttttggacgttgtgaaactcgtcgtaagaacaccaccgtgttgaagagatatccaaatcatactcaggatattattggtggtatgagagttgatgaaaatggtgagcctatatggcaacaccaagcattaggccctgatgggctaggtgaagttggaatgaaggttgaaagtggacaaatttatgtcaataaatctgttccaactaatgcgtcggatagcattctaactcaaacacaagctcagtacaaggagactccagtggtatatagagctccagaaccttctcatattgatcaagttatgatgtcagtttctgataatgaccaggctttgatcaaagttctattgagacaaaacagaagacctgaattgggtgataaattctcatcgagacatggtcaaaagggtgtctgtggtatcatcgtaaaacaagaagatcttcctttcaacgatcaaggtgtagtaccagatattatcatgaacccacatggtttcccatctcgtatgaccgttggaaaaatgattgagttgatatcaggtaaagctggtgtcttgaatggtacccttgaatacggtacctgtttcggtggatctaagttagaagacatgtcaaagattttagtcgataatggtttcaactattccggtaaggacatgctttattctggtattactggtgaatgtttacaagcttacattttctttggtccaatctactatcaaaagttgaagcatatggttcttgacaaaatgcacgcaagagccagaggtccaagggcagtgttaacgcgtcaaccaacagaaggtagatctagagatggtggtctaagattgggtgaaatggaacgtgactgtgttatcgcatacggtgcttcacaactattgttggaaagattaatgttaagttctgatgcctttgaagtcgatgtttgtgaaaaatgtggtttgatgggttatagtggatggtgtacaagctgtaaaaccgctgaacatgttgtcaaaatgactattccttatgcagccaaacttttattccaggaattgcttgcgatgaacattgcaccaagattgaaattaggcgatgtctttgaagcttgactgtaagcattttctgacgattctagtagtaacattatttattcagtattacttataaagcatcattttcacttgaattttcattattgattagtatataccatatcatagtcaacttttagtttagccgctagctcctgcaaagtcatttcatcattatcttctttccttagttcattctcaaatttctggagttcgttctgtttcatttcttctgcttctctcactttctcatccatccgttccctgatttcttccttttcttcaattggcaaatgaaagaagtccggagattccaagatctcttccatttgttgttgaatgccgtcatcgtattgatactcaacttggcgctttcttgcctctatttctttccgcttatactcttgataaccgcccattcgatcaattttaaccaatatggtattcaacatgtaagacatcccacattgacatatagacctccatttatttattaattcgatagtcttgagttcgttgtcgtaagtttgcattattttcactgcccttttcaaagcaaactctttcttcgtaagatctcgtatttgtcgatcaagatcgttctctaacctccggatctcctttaaaagtaacacactacccgtagatctttcttcagggtttctgcaagataacttgggcaagatatcactaaatgaatcattctcttgaactaaggttgtttcactatcaccttcaaaattcatgacattcgacataacgcctgtaatgagtactggtataagaattattccacttggtcaagttatgcctaccgcagattgtactcccgagctttgtattctgaatgtaatgttgagtatacatgtttaaaataatttacataatgtaatttctattttcatgaaatttaccgccgatgtctttgacaaggaggcaatccaatataagatggtcgaagacataggattaccaatgaatttaaaattgaagaaagtttgaacttatcatacaatcatttgattattcatctgcttcagattcagcatcatccattactatgtcttgggctccgtcagaaatattttcttcttcttcatcatcgtcagattccaaggattctcttaagagtctggccttttcttccttaacctcattttggatagcaacccaggaaccaagaggagtatctttccacgatatttcatttaagaatttttctacttctgttctgttgtttggtccgaagtctacatctgatctcttctttgtaatgaattgagcgttttggttgattttatctaccacgttttgcaacatcttgttaaactttacattctcagaattcttgatataacgacgtaatgagataacggcaagcgttgttaattctgggaatgaaacgcttctggagtatagaacaaagtactcacctagcaaatctacaaattgctcagctagcccgtcttggtatatttttgtccccaagtatgcttgtgtacacttgatgttatgatcaaagtcaaatgcaggtaacgttgactttctaggtttctttgtgaatgcagtagaggagagaatctcagataataatgggtaaactggaatgaagataccagtgttttgagataatctgatcaaggatctgatcaaataaaatctcaatgggaaaaattgtgctgttggaatcaatctaatgacaccaatggtaacttggactagtgggtaaatcaattgtctaagaggggattcgtggccgttttccttttctgggttacattggatggatataacacgagaccagaagtccaaagagtgacagaactgccagttatatacaatcttgtaagcacttgatgggtccacctttgaggacctcttagttgtggcattgatactgtttctcaagtgaatggctagttgtctgatatattcgaaacccgattgataacttataacgtcatcaataccgaaaagttcagcagcagagttcttttggaaattgattagaggcatgtttctgatgttagttttacgacaacttttaatgaaagtagaatacgtggacttcaatacaacttctaataaagctttcttatattcacgagaggcattgttcaaaaacgcgaatgtggcaatttgagtttcaacgtctccagtagtggaccaaacttcgacgacttgagaaattaattcttttagtaatcttctaaatgaaataaagtatggtaatagctcataggtagaatgcaaaatcattgaagcgacgtctgtgtttgtgatgtcacttaggagaacgataagagatggaacgtgcgatttcaaaacagaggacaattttgtaacatttttatttgatgggagagttctggtttcattcttactgaccctataaggtgtcaatttttggacggcttttggcatatccacaagggcaacgaacattaactcgtggaaggctttttcatcaagaactgtgaacttgtaatcgtctacattttcctcgttgttcatgttcacagcagctttaaaagctgaaaccacacttctgatagttttgaaagatgggctattttttaaatccttcttccatttatttacgagctttatgtcgacggcaattttgctatctttttcctccttcttggactttgataaatcaggttctttcagttcttcttcttcacccacttgcccttcttcgtcatctgatatttcatctagaggattggtagatttgaaagacaaaagatctggttcgttctctgccaaatatttgtagaaatcaggatccttctttgccaaatcttccatatccattttaacatcttcatcttcttcggcagaagactctgaatcattatctttcacctttgatgctttttcggtttctttagccattttctttgacatttttggaatatcgaacccattgtcgaagaactcttcaaccttcatgtcgttgaagacttcttccttagcggacttcttcaacttttgatcttctttggtcaacgcagctgcattcttttcttcttctgtcttattacccctacgaccggcggttctcttagaatgatcttttaacttctttctatggtccaacgtatgcttcaagtgtttcgtctgaaactttttagtagcttttgaaactttacccattgtgtaattcttgatccctttatcaataggtaacaggtcccaagattatgcctttgatcaacaatatgatttcaagaagattatctagagcgactactggttaagttgttagagctgcgttaaagtttctctatatctcttcttggggcatctcatctcatctcatctcatctcatctcatcggattgaattttggtttggatatttggaaaacttttcatggcgtttctttttgtatccgggtaatggcatcgccttgacatcgatgaatagtgcaagtaatatggtaattgacatgcttggaaaggtatcgacaaaagatgcaacaaactgcaaacagaatgtcgagagatgcaacagttttgagccgttattgataagagtactgaggtatatgcatcagaaaatagtagtagtattaccttttatgaaatcacggctccaagcttttaagcagtttactcggtttgtatcatgcaaaagctgtggtgttgagttgcaatccaagaatccttctgtgacaggctactataagcctcctcgcgctgtcaggaaagatgctggcaccattgaagatttgaagtatttaatgttcacacaagaacttcagctaaaaaaacatgaaatcgggctacttgatccagacaccgatccagattataaagaacctattcccaaaagattggtttgtaaaagatgtgtcgatgctataagtcataacaggtacaactcatctgattttccaattcattctttcaacgatataaagggcgctttgccgcatgctgcaaacgtataccacgttgtgtctttgtctgactttcccttgtcattagacaaaactatcctggcagaaaagaataatagaaactatttactactttcaaaggctgatcagatcacatacaagtcatcaatgctaccacataaagggagtgctttttttgcggaattttgtagacgtcatataggcgtacatgttaagaaagtagtattgttctctaacccaagaaattggaatattccatcagtgataaatgctttggctaaaagatgctatttattgggtaatcctaacgttgggaaaacgtctctcattaattctttgctccatgaaaaatcaacaagtttccaagctcaacttgataagagaggcaacgttattggtcctccaaaaggccacgaacaaatacaaagtactcgccgtagggccatcttcaatgaaggtggagtatcacatattcccaactttaccagaaccatgcaaacttatttgatagaagataaagttgtgaacgatttaccagggtatacaatggatcctactaaagtatccgatctagcgaattatatcgagaaggaaacgcttgataacataaggaaaacctcaaagtttaagattgataaactgataaaacaaaattacacctctttgacgggttcaaaaactggtaaatgcctgtcttttggaggaatttttcatcttgttccaccaaattccactataaatcaggtggttaattacattcctcttccggagcatgagttttcaaatgtcgaaaaggctgttagcttatctctagaggtgctacagtcagaaaatcattcacttcgccaattttttgctctcaagaaaccatttactgacattaagatgtttgataggcacgtaattcctccatttaatggagcaatcgaaattgttctaaaagatatcggatattttcaagttaaacctactggaaaatatggtttcaatggtctttatgaactctgggtccctaaaggtatcagggtatgcattagagaaccgttatcaaaattgatatcaaaaagctatgaaaagtatattgaaagtggagacatcgccgatgtttgtccaaccgatcgtccactaatttcagacacctatattatgaaccataccgaagaagatacatttgccagaatgagagaaatgtacatcaataggacttcaaaagatattctctcaagaagacttcttcaaaaagatcccaacgatatagttggaactcttcaaagcccaccatcaaacttgtactggtattacaagtggtgattggatacacaaaactatatgcagcaatatggaaatagccctgtaaatagaaagtaagtagttttcggtattgagcgtaatagggaacaaagcgaacagagaagtatcatgactaatttcttttgtttgcttgtctgtttcttttactttccttgacatgttctctgcatgtgtgataatatttcatttctcaggattgatataagttgaaaacggtaaatgaaactattacaacaaaacttctctgatatccaggataccgaacagacgacttcaagacattaatgaaaatctaacataattcatagaacataatgactgatttgacgctgcgatgtatgcattgtcactcaatgttggaaatagacgtatccttgatggatctttctatggcccaacgtgatctgttagtatcttcagatgccaataccagtggtaaagactctagtgcaaacagcaaccaaatacctgcagataaactgaaagtgatgaaagaagtgaaacagccgtctcaacttcggttgacgaagccagggaatattgcatctgattcgtatgtctttttgacggatacagagtacagtttacaaaaatccaaaatagggggcgacgaatctggagatgaggaagactatgacgataggaacaagaccctttcgtcgagaatcaatgcgcttgggaatatttttaatatattatcctcgaaaaacaatgtagattatcctgtttgccaaggttgttgtgatacattattagaaaagttgaaggaagaatacaaccaggaactgaagaaaagagatacgtaccatgactttatgaaaaggatacaggagcataaaaacgtcaatggaattaatattggggataacagggctctagaagagctttcctcacttaaaaaggagaaagaacaacttcttcgagaattgcaacgattagaagatgaggatgagaaactacagaaggagacgatactgctacaagaagagttagctaagaaaaaggaccaatatatagtaaggttacaaaagcagaatattcaagagctggagcaactcactttcatcaaagatgtgcagtctctcaagaatcaaagagtggttactctcaaccacattgataaattacggaaactcaatatatacaatgaaacttttcggatatcacatgacggaccatttggaaccataaacgacctaaaattgggaagtgttccaaacgcatcagtaccatggtcagaaataaattcagctctgggacaagttgtattgttattatcattaatcgccgaaaagctatcagtttctttcacagattacaaattgattccgatggggtctacgtccagtatagaaaaatttgaccctaaaacaaatcaatggtttgttcacaaagcattcagtggggatgaatttagttttggatcccttttccacaaagaaagtgctattgacaaggcacttacctgcatacttgaaatcatcagtcttttgtccgccaaagtatcttcagattcccaggatccagcgtcaatagaactaccatatgaaatcttgggggataaaattaatggtttaacaattcttcttaatggggcaacaccttcattagaatggactacttcatgtaagtttcttcttactaacgttaagtggctcttggcattctccacggcgcatattgacaaaaataaaccataatccagcatccaccactttacataatctgatcttcagagagtacgtagtcaaataatagtagtccaaagatcagttcaaataactcaactgcatgcaccaaatcgctacttatataaaataggcttctgttctttcccaacgaagcgtttcttattcacatatgctgcggtttgattttcatttaattcactgacgctaagaaacgtcgaaaccttagcatgaaaatcaataaggtttaagaaaataaaaagaaccgaagacatcaatttcaaatccactgaatttcagaagaacttaactacgaaggggagcaaagagcagctaagtgatagtatattaagtgcataataaccttcagagataaaaatactttctttgtgaaccttgattttattggttagttatatcagcttcttttaggcgattcctggttgcctttttaatcattccctatgacggagaacatcgagctatgggatgcgagctcatcccataaggaaactttcaataaggacaagttgaaaaagtttttacagacattaactttcagtttgaatgcagaatatatcgaattggatacgttggtggaaaagattcttgtggggataccaaatgaacctacggagcgctccaaatttgtgtcatatgtggcggaaaccgtagccggttcaaccagcgcacatccagattattccatcttggctgcgagagtagaaattagagagttacacagaatcataggtgatgcaacttttaccgagaatttagccaaactaaggaaaattagtcgtgaagtgacagaagacgctacgaaaagacggaaaataactagagacttatccaaaaatttgatatcggacgaattttatcagtatgctcttaaattcaaggataaaattgaccaggcaatagacaagtcaagagattacaacttcacttattttggatggaagactctttgcaaatcatatttgatgaagagaaacaatgaacaaactcatgagactccacagtttatgtttatgagagttgctttagctattcatgggcccttcgatgatattgattcggtattagagacgtttgagttaatgtcacaaaaatatttcattcatgcttcgccaacattgtgtaacagcggtactgttaatcaatacttgtcatcatgtttccttgttgggatggaagacgattccatagacggaatttacaaaacgttacataagaccgctttgatctcgaaggcatctggtggtgtcgggatacacgtttcaaatatccgtgcaaatggagcatatatctcaggttccaacggaacatccaatggccttgtgccaatgttaagggttttcaataacactgccaggtatgttgatcaaggtggaaataaaagaccaggagcattctgtatatatttggagccctggcatgcagacataattgacttcttgcaactgagaaagaatcatggcaaagaggaaatgagggcaagagatttgttttatgccctctggatacctgatctctttatgaagcgggttgagaataatgaagactggtcaattttttccccagatgaagcacctgggctaactgattgttatggtgatgaatttgataagctttatgaaagatacgagaaagaactaattcctaggaaaaaaatgaaagcgcaacaaatttggtcagagatacttcaaagtcaaacggagactggagtgccgttcatgctctataaagatgcatgtaataaaaaatctaatcagaaaaatctcggcgttatcaaatcatctaatctttgctgcgaaattgtcgagtacagctctccagaagaggttgctgtctgtaatctagcatctgttgccttacctacttatgtcaatttgagttccgatggaccgcctgtatttgacttcgtgaaactacatcatgttgttaaggttctcgttaaaaatttagataggactatcgatgtgggaaaatatcctgttcctgaggctagaaatggaaatataagaaacaggcctttggctattggggttcaagggttggcagacacattcatgctctgccgtactccatttgaatcggttgatgccgcgactttaaacaaacagatttttgaaaccatatatcacgctgctatcgaggcttccacagaactagctgaactatttggtcattatgagagttttcctgggtctcctgcctcagaaggccagcttcaatttgatttatggtcattgaacaaagataactacaagtttttatttgatgattgggattctttgaagtcaaggattaccaagggtaaaggactgcgtaattctctattggttggcccaatgccaacggcatctacttcccagattttaggattcactgaatcttttgaacctatgacatcaaatatatactccagaagagtcttgtcgggtgaatttacaattatcaaccaatacatggtggatgacttttgccagttgggaatttggaatgaaaagttgaaaaatcgtattcttagagacaatggatcaatacaaacgatagaagggattccagaagaggtgaagaatttatacaaaaccgtgtgggaaacctctcaaaggaaaatgattgatttatccagtgatagagcaccctttattgatcagtcgcagtctctcaacctttaccttcgtgaacctaccatgggtaagcttactgctatgcatttctatacctggaagaagggcttaaagactggtatgtactacctcagaacccaagcagcttcaagggcaattcaatttactctaaatgatgagaacacgctcttagataaagtcaccactaaagtcaaagattctcgccctcttcatccaaagaaattccttggacaataccctaaacatgcaaatgacgataatcacaaagcagataagattttgccaattgaagatacttatggaattcatgactctaccccattggtttgtaacattattgaagggagtacttgtgaaagttgttccggttagtcagaaaaagttgtattttaagatacataacacacttgtaaatagcaatataaattgaaccctatgagggccggatatattaatacatttcattcaccgaagttgacatttaaatcctcatgatatactgcattagcaacaggtaactgttttcacaccgttgcccagatacataagtcatttcatttcatgattataaggagctaaaaggagaaattagcagcaccagttccctttctcgatttacgaatggcttcttattcaatcttactatctaaaggccgcaagagtcaacctatcaaaaaaaaaaaagggctggatgcagcaatccattgaaagacctttccgggatatctattcctaattcagtaatttatcatcaaaacgatcaacatgtcttggttgcgttatgaagaaaaagccgaggtcatacatcggatgagaactaccaacagaccaaaaagaacaaacactatagaatatccagattaaagttgttttggtatttctagaatgttgtttgaaaagaatcccatcaggcattgctgctactattctttctcgatttaagaaacagcactgcaacggtagttgattgattcacacttttccaacgctctataatatatatacaaggtgcaatatttcaatattactgtaatgctttcgaggttgcttctcgctctcttgagaacaatggcagccagcagtaatattgcgacgtcgagaaacggtaacctccccttgtgcatctacacttaaagtatttctaaataattgattttcagagtcattccatcttaccaagtacaacccgcaaagagtgtgatatcagggaacggaaatcctattattctatggcctcatttgtcctagtattattttctggttgaatggatatcctatttagtttccctatctcatcatatttaaatacgttaaaacagaaaaactggttttttctaagctttgaggaagactaaaggtgattacaggatattacctgacgatcacagttgcgcacaacagctagaggatagtaccgttgcgaaacatactcaagtgtgcataacgcgaagtccaacgtagtttcttttattgcttgagttttttgatattgcttatttcaggatgctttcaagatctgctcgttgttctagggctgttctcttcagtgccaaacgctctctagcttcccaggctaatactggtgctaatgccagtgctaaccaggttatggtatcaaagcatgtgcaagacattgacccagaaatgtatgacatcttgacgaaagaacgcaaaagacaaaaacattccatcactttgattccaagtgaaaacttcacttctaagtctgttatggatcttttgggttccgaaatgcaaaacaagtattctgagggctatccaggtgagcgttactatggtggtaatcaatttattgatatggcagaatctctgtgccaaaagcgtgccttggaattgtacaatttggatcctcaactatggggagttaacgttcagccattgtccggtgctccagctaacttatacgcttattctgcagttatggaaacaaacgaccgtttgatgggtttggatttacctcatggtggtcatttgtctcacggctaccaattgccaagtggtactaagatttcatatatctccaagtattttcaaacaatgccataccatgtcgactcacaaactggcataatcgattatgatttcttgtccaagacgtctaaattatttagacctaaggttatcgttgcaggtgcttctgcatactccagagtcttggattacaagcgtttcaaggagattgctgatgcatgcggggcctacttgatgtctgatatggcccatatctcgggacttgtcgccgctggtgttactcgttctccattcgaatattctgatattgttacaactactacccacaaatctttacgtgggccaagaggtgctatgatcttttacagaaagggtgttagaaaggttacaaagaaaggtaaggaagtcctatacgacttggataagagaatcaacttttccgtgttcccaggtcatcaaggtggtccacataatcatactatttctgccttagccgttgctttgaaacaagctgccactccagaattcaaagagtaccaagccgctgttgttgaaaatgctcgtattttcggcgaagaattagtcaagaagggcttcgaattagtttctggcggtaccgatactcatttgatcttgatcaatttatctaacttgggcattgatggtgccaggttggaaaccctgttggaaaacatcaacattgctgctaataaaaatactattccaggtgataaatcggctttgttcccgtcaggtttgagagttggtacaccagctatgaccactagaggctttgggccacaagaatttgcccaagtcgctgcttatattgacagagctgttaagttagccattggcatcaaatctcaagaatctccagatgctaaagacgctagatcgaagttagccagcttcaaagaactatgcaaggaatcagaccaagtcaagcaactagctgacgaagtctatcaatgggttggtgagttcccagttccaggtgaattataaactaagagatgtatagttgaatcgagcctgaagagcgacgtttcctagttagtatatgtatggcctaaataaaattagtttcaatgggttcatatacatcaacaactacaattgccggtactgacagcctctgggctctgctccaaatttatgccacctccttcattactggttgaggtactttgcggtacatcttcttgaagtagtgtaaatttatcgatgggtatgtctttacctattttcagaaacaactcatctatgccttctccagttttggcagatactagttcagcatcattccagttttgcaacgtctcttcatccacaagatcgattttattccccacaactcgtagctgcacagtgtctttcttatagtcctccaagtaattattcaattcatcgatccacgactgtgctttcttttcacttgctagttgtgtcacgtcaaacactatcaaggccacatctgtatttcggtaatacatgggtgccaatgaccggtatctctcctgccctgcagtatcccaaatttcaaaattcactcttcttttaatcccatcctctgagtcaacccactccatcgccttcgtactaaaagcagcaccaatagtggggctgttaatatggaactcgccagtggtaaaccttgtcacaattgttgatttccccactgatgattcacccagtaaaaccagttttactgtggaaatgtatgtcgattctgtcatgacttttatgctaattccacgtcaggtaagacaaaacgctactgaactgtattcttccgctgattaaatttacgtcttatctgcctttgattgtcttcgactcaaaatctaaccaggcattgatccggttgtaaacattctgcacttatttctgccctgcaatgccaatcctttaaatttcccatttttctttcatgtggaatctcaaataaagtacgcgtttgaaaccttttcaactctgttaacgtgtagatgagatgctgatgcaattaggaagaggctaagataatataataccagtaaattcatcgcaaagtcggtgtattcctttttcgataagtaccaaaagttggttcgtttaattgagtgctttgttattgagggatacgggtcttagatttattaagagacattaaatcggtatgatgagagatccctcgagaagaacgcgttcagaagggaagaccaaagcgttggatgcactggataaacatatgacgcagcgttctacgttaaaaaaatcattagcagcaaatgggcccaatgtgttggcactcagtgagagtttggtactgaatcacctaccgtcaaactctgaaaatgtatatcaaagatcgccaacgcccagacgttccagagaatctgatgtagtgatgctggaagataaatcaagtggtcttatatttgaggaggatgccggggagaaagcgcttttatcctcgccgataaggaagggtgtgtccttttcagatcgcgtggagagttctccaacgatgcaaacgatgggttcttcacctataaggccctcttctatgacaaaacctcctgcgagatcaatactgaaacatccttcacttcattattctaaacatgatagaccttcgagcagaaattctcccagcaaagcttcgcatttatctattgatccgtcttctacgaatttttgggtggagggagaaatcaagagcatgatcaacactaacaatgtagctgaattcaagaaaattctgaaaggcggtttacatgtcttaaatgtaactaaaactcgagatttcgagatatatgcgactttcaataacgtcattccctctatgaatggtgtaattcttaacgacattgtgcatcaaaagatcgacgttcttatcgagtgtttggacgaattacttgatacgagcatatatgctttaagtcatttacaggagtcattgttgctacaacagaaaaaagatccctttaaatcgaggtgttttatccaagtgattcgatttctgaccctactattctctaatttcaagatcattaaattcctagatggtaacctctcgctacaactgaagtttatagaggttttgaaggcttgtgaggaatctttgacgcatagtaacactaataaagtgatggtaatatacccactaactctattgaaggaagagaagtttggacagttctatttaccagattcacaaatacgacaattggtaaattcggtgtttacaatgaagtatattgatagcacgaatgttcaatgtgaaaggctcatggttttaaagcagtttttgcaaaagtatagcaaggtgatgttggaaactcttcgtacttggtttccgtctgaagtggcggcacgatatctaatggaagacagagtaacatccgccaagacaaggtcctgctgtaatttgatcatcttagatttactacggaagtgcatctccaatgacaaagtcagaacagcaattattgaaattgaatcactatcacttaagagcgttgtggaaaattgtccgttcggaacggaagtagatgtggaatacacagaattcattaaagaccaaacacttggcacagctttatgcaacaaactcatttctcttatgaatgacaaggaggagtacaaactttccatggacttttggttaggcatgacgggattgctattcaattcaaccaaaaatctgtcgttactgttagaacctgttggaagtcgttggttggcggttaatgatgtttgctttaattccaaaaaatcaaatctgagaggcatagctatcaagaataggaggatattaaactatatgattatcactactattacgcatgatatcgataaccatgttttggatgcattgatacaaattgtcatgaggccctttgagtttccggacaatgaaggtttatcagaatatatcattttcgccttcaatagtataatgtatttgacatgctgcgattataaggatatgagctcaaagagattcgctttgcttttcgaagttattcttaaacctcttttccagagaataaaccaaccaactttattgcctatcttgggacctcaagctcaccaaatacttcccaggattattcgactcttttcagatgaggaaaactcatccccacgccgatctataggattccaaccattgaaagctttatcaacaattggtatcgacttgcctgattttgagcctatgagcaacacaatcctcgaaaataactggaattccatagtagagttgctcaaaggtatgattgcctggcctgggtttaattctcagaattcccttatgatgcttcagcattgcatcagaagaagtccgtctgtcattcccagtaatcaagcttgtgctcaatccttggagtacctaaaactaattttagaaaagggagagatcgatagaaatgaggaagtcttcaaaactattataaggagcttagcggaaaagtatgaattgcacttattcagcaacagctccattctcttaactaaaatattcccaatggaccaagttacttcagctgtccaatttgaaatgtttaagaatatctttcaactagttaaaccctttgtcaaacctctgctactattcgggtatttcgacagatttagcaatgatttgatatcaaattatattgctaatatcgttggatctatgctgatacctacgaatatgtcccagcaagaatataaaagtctcttacagatagtcaataaaatgccagtacctgaagtcattgataatttgtttacttggctgcgtaaaacggacaactggggaagtattgcaggtgaattgaacttatcaacatggaatgatcatttgtttgccaactttatccaaaaatggattcaagaacaaaagaactcttggagtcaagaaactgtccgcatgttgactgaaagtctctggaatagaccagcagcattcaaagagctgacagcactgctgatcaatgcagaacaaactcaaatcattaaggacacccttgagaaaaatccagacattatcgatgatatttcaccattaggagatttgtcattattggatatcttacctgcaacactggtaaaatcctcattttccaaaatacagcagtacgatgatgttattaaaaccaagcttttcttgtgcatatcaacactcgatgagattagcataattaagtcgaatacagaattactataccaattattgttacctactgatgatgatgtgtcccttaacaatgacaggaatatcatcatggatatgttattgaaatcttcaatagggcatcaagactgggatttactgtccatgttattcgaagtttgcttgctacgcagagattcagacaaaattgttgacttcttgacagctggaaagataaagttcgaaaatataaaaccaaacacaattgctcggatgataaatgaaagtggcaaactcaattcggatcttatcgatttcctcagggatagttttaagaatctaaatccctcttacgttatcgatttaatggagcagctattaaaacagacaaaatatcaggtatttgatataataacggaggagttactcagtttcatatttgatataaagcaacaattatcagctgatgacaaagaaagattgaaaggaatctttcctgctattgtggactacttcgttggaagcaatccaaaaattctcactgatattatgaaatatgtagttaatatcatgaagtctgcgaaggaaaaacaatatggaacttcactaatagtgctctttttaaatcatcctgatttcaagatacaaggtaataagactctgttgaaaaagcttaatgtgttcaaagccaatgcaaaaagaaactcgactcgacaatacaaattcatccctccaaaggaaaataaaaaggtatcagatcgtgagacgctgcaacataatgaacagcaagataatacaaatatttttcctttatctacattatctgttatcgaaactaaggtaacttcctccgaagagcttgaagttccgctgcaaacactttcggaaacttcagatgagctaattcgaacggggtgccaaaaagtcgttgagcctatacaaaattctaatgacaatgaaccagtaaaaatggctgctagtgtacaatccgaaaagcttgaagcagaaacaacgcagaatgcagtgtcacaagtttcatcaggggaaatggaaaaacaaacgccttctattaaagatagcagcactgaagtcagcgaatgtctgccaggtgttgcaaataatgatgagatatctaagaaccttgatacagtgacaagcgttaactccccatctgggctgcctctgaagataccaatttttaatcctttctttactgatgttatcaaactcgaagaggatcttgcttcgaaaggcgatacctatatatcagggaagcggtctttagaactgatgaactcagctggtgatgttgcaagtgcaaattgtgaaggacagcatcatacaaaaaaaattatgcgaattgtttcaagtttaaatgatgtcgatattgatgatgtgaagtctttaagcaacaacgataagaagcttttgagaaaggtaatgtataattttatgttaaacttagaagattaaggacatgttgcagtcagatttttcctatccataacaaaaatatttctcggaatgatcaatttacgtaaacaatatctctacagaatacagttattcttttgaaaaagcgtctccattctaacgggtcaccccgtttcctttcaaaagtaacggatttcagatcaccttccaactgcatgatgactagagatcctgaaagtgggagcttatttctatcatatgttttgagctgtatagacacaggataggggttactctctccgatctgccgtttcagttccaagaaattatcgtgaagatttctactcactctaacaccatatgcaaccaaagcattctctaggtctgagaggattacactaatatcatcagtagagaaaaatttagttagcctgtcagatgaaaagttaggcattagcttcatatcattaatattaaactgcaaggaagcgagatcttcttggattctcttggttgaaaatggctcctgcgtcattaattccctttcacttgaaaaattcgtgctgcatgtaaccttttgagtggcagagtagccgtttcgcaaattagccggtaaactatctatatgtgcaagctcacgattgagaggttgggtgaacgacatctttgcatgttgattggcaaacacttcctgcgtagaagataaataatcggcatctgatagagaaactttaagctttgatagtaatttttctgcaagcaaagaaggatttttacaaaggccattttcatctgcaaatttcggatttgtttgataccatgtatgtttccgtaaagtatccaaagaagctcttttctctggatctggttgtaatatttttctcaagagattcaattcaacgaaatctatcttcagccaagatccctgatctagctttccttcgcctttaataaagtttctaaacgtttcatcgtcctcgtgaggaagttcccaaggcgtttctccagtcaacaaaacgaataatagaacaccaatggaccaaatatctgtcatatcagcatagtacccatcacagtatattatttccggtgccatgtagggaagacttcctcgttgatctctagaaatacgttttgatccatcttttctcttgaacagcgatgctagcccaaaatctgcaagttttaaattcccatctttatccaataggatattttccggcttgatatccctatgggcaacaccacaggtatcatgcagataacttatagcttttataagttgtttataatagaattgggcgacttccgagtcgactccaatgtcaggttcgattttatcgaaaagatcaccaccttcagccagttccatggctatccaaagaaacggatcagaaagattgcaatctataacctttagcacattaacaaaattagagcatctagaatgtaacttaacttccctcaacacatcttcctgactcataccttgtttctcacatgaaggaagatgtatgaatttgacagcaattacagtggacggatcaacttctaaactagctctcttcacaaaggcaaaggagcccttcccaattgttcttcctagttgtaatccatcaatatgagggagctgagctatctgtgaaaagctcatcaatacatcaatcgaagtgttcttcttttacttcttttttgttcttgtcggttcgtatctcagaaatctccagctatatcagccaaacgcacattcaatatttacgcaactgatgtgctcaaaatatcatccaaccgtcctaactgaaccccaagtgatttacctaggataacacgtcggagactcgtatataaatcccgttttccccataagtatcatcataaaactattgtttttcttttctgatcagatctgcgatagtcattagtttctgtcatttctttgcatttataaaaacgtacattgaaaggggttttactacgtttatagtttaatcagtgaacaataaacaaatccgatactgttgatagaagcaacgaagcagtggtgagctttttaggagtggtaagtgtaagattaggcaaatatgaatacgatggatacactggatacgcattttgtttcctctgtggaaaatgcggtacaagaatcattgcgagagaacaaggcgttattggtttatactacgggcggagataattcgtggtttgagtcgtggtttacaccacttgtaggggagcagttgaaggattcgtgcgtttggttacgtttagctgctggaagcagggaaatgggttactttgagcaaatattcccggatgtgaaggttcctagcgtttattgtattgctaagggacaaatagtggagatgataaatccagatcagttggacatggacggatttgctactaggttgatccgggcagttggtaaaagcaagaggagaatctctgaaacggatgccgttgatgcatccaataccgttggtgccgctggtgataccggcgccaggtccggtagctgtctgtcacaaaatgcgaaattgatggagtaccaaataaaggccaagaagcaccagttgacagaacaacaggaaagagaacgtattgttagattgatgaaagcggaccgtgaagaaatgaagcaacgaagattatcgtcatcatctccaaatcatactaaggaacacatcaatgaagtattggctgtacccattcacgataatattaaaaacagagatataataaacgcagcagtgtgcaccttgcttataagattaacagacggtaagacattgaaaaacgatttcgattcgtctcaaactttaaacgatgtaaggacttgggtggatgccaataggacagataaggatggtccgtaccagttccatcgaagtattccacgtgaaactttcacagaatcacaagaattactatctttgaaagctctggagcttactccaagatctgcattaatcttgaagcctttggaaaagcatacatattctcgtaagattgcagatgtagaaggaccaggtttgcttgggaaaatgtatcagaacgtgacgtcctggtggtacggtaaatcaacggttgttgatcaaaatattcctgaacctgctgaagcattaacatctcaagcttcatctagatatgtttctcccttatcttcccctcgtctggtacactctgatgcatcgataccctcaagagctgtctctccatcttctatacattacggccatgtctcagacgacaacagcagatagcacacctgatttatgaatcgcctttatgttaaatatcatatgtatgcatgaacgaattaaatatacatattaataccaaatatgagcaatcactcttatcggaagaattaggccaacagtttctcggtcatctcttcctttttcggttccttcacttccgtcttctctgcacgaggagagtccctgctcgataccctcaaggatccaagtttctttatcaaatcttctgttgagccagattccaaaggtgctgcagatttttgttcttcgatcttctttttctccttctcttttgtatcctctgttgatagctccttctctaacagtgacaattcttcttcaagagcatcattgtcggaaaccgactctcctactaacaaattatgaatacggtcttgcttctctgtattttcttggaaatcatctaatatgtttgaaatagaatcttcatctaaaagttgtgaattgatagccttcaaagcggtactgccttgttttaaaagattaatcataaccacattttgtgaagcattggatatttcatcttggagtttcctaagagattctaaactcgtgtaagcttgttccaagttcttttctgagcgttttttcaacctaagaagtgttctcttaatctcttgagaaagacccgatgaaatagcgcttgtcagccgtttggtagtaagatctagcaccttttgtgccgattttatctccgtttccgcagtgaatacatattcattaatattggcaacacaaatatcttcttcagatacttctttggacgctacctgggggctcgcactcaacaacggagagataatcttaactatattttctgaaccgacaataatttgattcttatcacataagtaatcaagtattattccgtaggagtcccaatctttcacgatgctatcaattccggacgccttataaaaatgacccttagtgaatacatagtcagtcgctttgtgagcactttctttgatgttattcttcaatagatcttgtagtacctcgtcatttctctttaaccacgcaatattaacatatttgactggttttaagtacattgcagtctcattttttctgctcttccaggacaaatctaagattgtcttgctgatagcccagctcatcattgatattacgatgttctgattccttttgtgatattcgttaagggatactaacgtgccttcttttaccatctcatctagcactacgtcaatgcttttcggagcaccatactgagagtttgataattctgaaagtagatctgcagcatttatgattatcagatcactccagaattccttgattaaatattctttccattgtctgatgtttgcctcataaccatcgatgtttaataatttcagtcctctgaaatcagagtacaatgatcttaaccttgattctggtaacattattgaatggcagtagtccggaatcaggatgcaatcctttgtaaccccgatgtcaagaagagttgcagtttttatcgatctgattttcaatctgatttctcatctcaggcggcattagtttcaactttagaaaactcaatgcttaacgaagtttgaactttagaatttaaggaaactatttctggatattggaagcactaataagagtaaagttttcattggctgactaacattgtccaaggtacggcaaaagtaacaaagatgacagatgtgaccaaagatattgataacttggctgatgcccttcttacgatggagatatcacccgaaatcaatgatttgatggaaaaactagccctaaatttaacttcatcgaacaaccttccggtagacgtcaaacatctattgacttcaataaaaacctatcttacacagtcatcaagtgagatgttagactataatttacttttggaagtgttggatgcagttgtgggcttgtgtccgtttgaggatgtactcaaagttttttcagtagatgaccttatcactgccctcaaaagtggtgacaaggctttaactgagacggtttgccaagtaattgcggctgcttctccaagagatatttttgcaggcacacctttgctagatgaaatgcttaaattgtacttctgcgaatctactgttgttgctattgttaatgcgcttgagaagacgcttggcatcttagttacgaaccaattaaacagaagaagaatcttagaaaataacttaccggtattaataagtgttaaagactgtaaaaactctactactttttgtaggtttcttgatttgatcaagatactctctgcaagtgtcacttttgaagagtttagaaaagatatcttcattatcgacaacatggtgaccaacaagatgatggaaaatgatatacttgttttcattcacatatgccaatattatattgagcttctaactatttccttgacagaagacggaaaagaatgggtaatacggtatgtaaagcccagttttgaaatatttggagaagctttctctagaagggaagaattgtttgatgttggtcattttgcaaaatcgtatttgctaacccttttctctaaaatctcttacctagatgacaaatcatatattcagctgctcgaagcgcagttcttcccattatatcctgacaaacaatacctggacgaatttttgacggttcttgatcctagttacattgcaaaggttcatttggacttgttaaaagaaaaagcattacgtgcggggaatgttcatatgtttgtgaatctaataaaagatgaagactgctttgtgcaattaaaagacgaaataaattctaaaaccttgaacgatatgccatacatagagaaaatgcttttgttagacggtctgactttaacttcatatggtattcaacacttgactagaaacatgccatcagttatgaacagtataatcgatagtggaaatcaggttaccgaaaaattgtcgtttgacttaagactgagggtcttcgagaaccttttggaagccaacccgcaggagttgtccgtgtggttgattccgttgcaatctgaatatgctaatattctaaacggtcgtcgcggtcgtttctcctcaggacaacttgctgatgattatctataagacatagattttgatgaagttacatatctttatatatatcatagatacaacgagccagcagagacaatatctctgtgaatgaggtttaatgccgcttccatcttttcctttaatgtagcattaccaattgttttagacacatcgattagttccttgatcatctcttctaatcttttgaacattctgatgagggaaccttcataaacatctgtcattttgcaaatttgagtaaatgatgcaccttggcaccactcatataccacctccataagctcatgcctgaaactttcaacatactctttttcgactaattcaattttggagtctttgattattttagcaattttacctgctacttctctcattgctttcaatggctccgcaagttcaggcttcaaccttggggcctctttgcaacgctcttggaatgcgaaacatgataaaagagcagcagcttgagcaggggataactcgttgaaattaccattgaagattaattctgtcaataacaactcatcacccgaggaaatttcgcaggcaacacgccccttcaactctatgatatcggactgtgtacagaaccctaaacgacgtaaaaccctcttcctgcgacgcaaatcgtctaattggatgacagcttgtgcctcgttgattttatgcttcaaattcttgatgtctgcctcaatggccaccttgtttgagtatttctcataaagctctcttaatctaacagtatttgtcaatgggtttgagtataaccttccttccaatacttcgatcttctttagaagctttaagaagtcatcgtcgtcaattttcatgttcttcactggatcaacaatcggtacaccatctgggaaacgacgcaaagcttctctgagagttttccctactgttgcttgttgactttcagccttgatatcatttggcatgtacaaccttatatttccgatagactggattgaggagagagttataggaatgatggtacaagttgatttctctccttgttcagcaggtctgataccttcggggaaagttggattaaatggtttgatcaagttgatcggcgagtcagcatacatagtattgacgacaacattaacaatgtaggactcttcatcagaatagactgcggtagggttacgtttgttagttctcttgacaaaatcgacaacagctgcccacccgtaatcatatttgttgtcaattttcacatttattagtctaccaggttgcaagaaagctaaagaattggcagggtgtgtaataatggtacgcacatcttcgttatacccatccaacgtttttcggatttcatagtattctttcacagctggttcatcatcaactttgatggattccagtactgacgttaattcggctaccttcttttccatgactggaacagaaatagcgttttggaactggaagaatgaattttctaacatgaactctggagaaataccttccacacgcattagattcaaaatcatattataacccaaatggaaagcggagtccaatctgtcggcttggccttttaccatacctttagcgacttgaggttccatcttttcatcgatcatcataatgacaataccacggtcgtctaaaccacgacgaccggcacgaccagacatttgaatatattcaccaccagacacccaacggaactgttgaccatcccatttcctaacactcgtgaatacaacggtcttggctggcatattaagcccaatggaaaacgtttcagtagcaaacaagacctttaaaaacccttcttggaagagaatttcaataacttcttttagaataggtagcaagccagaatgatgtataccgatacctctccttaacaatggcaaaatgtgtttaatctgaggaagttctctgtctgattcaggaagaagatcgattgcattcttaaagatcttggtaagggcttccttctcttcctcagagttaaagtctaatttagacatcttcaaagccaattcttcacagtcacgcttactgaacgagaaaacaataacaggattatattttttcttccagatcatcctcacaattttgtatatatccccttttgcatcacctttagctgcgccacctttatacgactgcccctttttacctctgccattgatagtgtggacatcgtctccagtctggttgcttattgaagccatcgctttctggaaattttcctctctaaaagtacccttttcatcaaccacgagatggataccgtcaccatgagctgggaataaataatgttgtaatggggttggacggaagtccgtgtaaacaatgtgacatggttgggagtgaattctacagatccattccgcaaattccatagcatttggaatagtagctgaaaggaaaacataatgaaccttatcaggtagtaagataatagtttcttcccaaacaacacctctttctttatctctcatataatgcacttcatcgaaaataacccatgcaacttctctcatgacttcactacctctgtaaagcatacttcttaaaatttcagtcgtcataaccaaacaaccagcatcaggattgatggtaatgtcaccagtcattaggccaacatctccaaattcagccaacaattctctatatttttgatttgacaaagctttaattggagatgtatagatgactctctgtttttccctcaatgattgggcaattgcatattccgcaacgactgtcttaccggcagaagtatgggcagaaactaaaacagattccatgcgatcgatacacgaaattgccgtatcttggaaaggatctaaagtgaacggataagtacgtgcttcgttggttctaacatggtcaccaatcggcttgtaatcataattaggtggaagagcaacttgatgtctaacctgatgcctcaatttcactttaccatcgctttcaagttggaccgtttgggtatttccgagccctgcagatgcttcgacttcacgagatgcctccctttcgaaagcatccgctacaactgggatgacaactgatttattcttcttatcctcgatcaaagtgattcccatcttgaccttcttggaagatgaaatatctgaattctggagctgctctgcatcatcgccattagaacgtttggtgccagaattcttcacaactgatttttcgttttcagattcttctaatgcttctggagggagctcaaagtcttcattgggagtctccccgaaaacatcgaataacgagtcagacattgtatctcaacactacttttgttcttcaaaattgaacaggctaaactaccctgttttgaacaaattagggaaaagcactgaggttagttgaacttcgcaaatggcagtttatctttccccttatgttattattactgactgttactaaagaagcagtaatcacctttataatgtatgatacctcttttaacctcatctcatctcatcgcatctcatcttacaggttcttttattcaaatctttcacaaacataggaaaaagaaaatatattccgtaccgtatgatatatcacgtgcctcaacctttcagttccgaacatgcatcataaagtcatcagtgaaaggtaattcaagccatgggaaaccaacacattaatgctatcacttaattagatgggtaaataaaacgatagaacaatgaatggatgaactgatcgatttatatgacgataaacgcactttgatttatggtggtagtgaaatattgtgaagacaatcacattacactaaaacaagaatggcgtagtttatacgctggtgacctatactatccctgatcagatttgcatatgcagacttgagaaaagtacagctggagacgacaagcaaattaatgttggtggtgttgtttcctaaaaaatatcagtatgtaagaggacatcggatctgcagtagaaaacgaaagataccaacaaacctaacgatcacctctccttcggttagtgaagaaagaatgatattgtcacccgagaaatgatggaaccacgcctacagccaaatagattatcaatatttatcagccaccctctttttcagcacaaaaggtttaaaaaacggatatggatttgaggacttttcttcaaccttactgaaaagccacccatactgtaggcccgaacgaggatagaatcgaccaggacgttgataaagaaaatgttcaacgcttgattttcttcctcttcatgtggaatttgggctactaagcaaaggatactcaaccttacacagaatgtaaaattgatcaatgcagattcaaagcgcgggaacgtccctcctccagttataaggtattgtacgcagcaagatgcagaccttaaatttatttgtaaactgcatacctgctatgcgaaaagctttgggttctctccgtggtgttcactactcctgatcaaagctttctaatttttgtgcgaatagctcgcgtatttgaagaatataaagtgcacctacaggaggagcttagtaatcctatgtgagaaataggtgagtatcatactcatttccagcaaaatattagtcccgcaaggaggtgagagattcacgtacttctgtacatagacaccgtattcgggtggcgcccgaccagttcccattaggagatgtcaccggccaagttctctccgctgcttcggcttcagcatcatactccagctctccaaaatcctaaggttctcatccaaggaatcgaggtattcaatggcacacataccgcagccgcaactaaaaaagtcttcattaaagtggtcttttgatgagcttagattagctgcgagtttccgagcgagttatctacatccactagctggaaacacctacagtgatcctcataacgatgtcttgctgcctccaaatttaacgaagaaacaaaagaagcccagaatgacggaggttctgccttcttactttctgacgggatttcagacaatgacgctaattgtgagaggaaacgcgaatggcgaaaatccttagaggaagaagattacgtcgattttggctgcagaaccaaaaaggtttccagcactcagctcaatggccctttagttttttcgtagtacgctatagacagtagatgtcgaaggctgttcttcaatctgtgaagttgttttgcaaaataccttttcattgtcaagggcaaattcaggaagcagaatgatattggcaattaatatttcagtggagagctgagaagatgaaaaggaagatgtggaattattttgtctgtttaaccgccaaaaagcgtttgttctatagaatttgatattgattccactgataacagggataacagtgactaatggcacgcacgagcttaccattaacgtccagttttcagtttccttggtagtaatatataattaaatactatgattttaaattgttacgtatattgacttttgaagaataagatacttctgacgtcatccacgttaaggttgcccgtcggacatgctctatggtataccactgacgatgataacgctatttgggaagctttgttatttggtcttccattaataggtcatttctggtttgaaaatttgaatcgttttatatttttggcctacattcaaagataacggactaaaagtgaaattataggaaataatgctgattgataaagacaaataaaataattacatattaacggttaaatcgacaaacctcattgctcgaaagatacaagcaatataagttctcttatgctaagattgaaagccatatatgacaaagggatactttgaatgcaaaggaatcagtgtaatatttaagtaatattaacatcccgtctcgtttggcgttttctaggtgttacttattgtggatctgctgtcggttaagaagaatcgagagcttttccctatcgtattcactcaaccccgtgtccattccagaatattccgtttctgcatggaaactcaaggaactaccgaaattaccatcttcttctttgatatcaaacgattctaaatctgatggcgcttgaagatcatcaattggacaatctgcttttggtagattagtagtagacactctaaaatcgtttactggctggtatatcgagcttcttcttcttgcgttgagtgttgatattgatttttggggtgaatgtttctgttgcagtgaatgtacatatgacaaatcaatgttgttaacagagttggaatttgagtgttgatgttgatggaagcttgttagggttaatgacttggagtggaaatgcatgttaccatgtgattcttcgtcgtttctcaaattagttcttgaaagtctttgacttagtcttttcttcaacctagttggcgatgattgcacagaacttaattgccttgagttattgttacttaagtaaagggatatttgggaatcgtctcttccgtcttgcgtagaaaacgcaccagaattgaacttaataggggttctgatggcagtgacaattgatgaaatggactttgttggggaatgttctatgtgggaatacaacgccggaactattggagatgtgttctgtttcaagccttcttccatcaacccagtttcatgagggtgaattgctctgtcgacaaaactcatcacctcatcgtcaccgtcgtacatttcatggccttgggggaaggtagtctttttcagtgggaagctgaagctggtgtcaatatcgaaggcggggtataattgatcagctggttgtgtgtgatccttttctctgttcaacagcatgtctttattcttgttccagtaatcaatcgtaattgtgctgttaccgatatccgtattcaaggctggctgagacactgagttttgagtagaatatacggcgtgctccggttgaatttgcaaatcattttctagtaattgttctaaaacatcatcactttcctcctcattttgattcgacggagccgaatccctcatatcattgtatttgactacttcgtttccaggtggcgatgaattaactgtgggctctaatgctttcggattatgcaagatagatgggagtagcacactattataaagattaattgcatccttttccattttcaggagattgccatctatatcatcagagtcatataaacacactgacctcgcactattaacttcgttagtttgtttcagtatgttaagataacttttagatacatctggaatggttgatagtcgcgtgacgtacttcgcgtctatttcagtttccaaataagaaatggattcaggggtccttgggttagaaggactctgtttatctttatcagtaggtgatttgatggagaacttcctctgtattttttcgaaaacctgtttctttgatgtgggactaatggcggtgaacgaggaattttttaatttacttttgagcgtgtggttggatgcatctacgacgctttgataaggtagcttatgtttgatgacagaaggtgttgatgtagcatcagaaccggaataattagttgggtattcattcatccagtttttttcgatagcgatttcaagctcaggtgtcagcgtctgtgcacttgcctttaaggaaacgaatctctctctggtttgattgcacactttgatatctcctttagcgtaggtagtaggtgcctctttttcgacatcagtgacgttttgtttcggaacaggttcgagcataatgatattcaattgcattccacccaatagcatggcagccagtagaactcccagatgtgctctcatcaagggaatatttagctcttctatcttgaaattgtgcagcaaataataacagtgtgacacagacgctccgaacgttaccagaatcgttatagtgatcaatgtatttagagtttttagtaatctgtatcgcagacctaactgcatcaattggcatatgccgcatagcatcgatgagcacgcaattataataatactagacatttctttccaatagcttcgcagacaaatcatagcaattgatagacttccagtagccatgttaagtagagatcctgttagcacaatgcattctcgaaggtatgaaaccatgacgaatggatgtaaattaaagatcttgacagtacttgttttaccagcaaacagcgagaagaatactcagctagcttaggatgtcggatattgttaatataaagaaaacaaaaagaacaattaatgagacacacacgttaagagatcagtcccactatattataatgcttgtagtatgatgttccttgaatgcagggctgtcagttgaagtcaagtacccttcgaatatagactccataataaacgaataccccaaatttgattaagacaatgtgaaaggtgaaaacaaatctcatatcaaggtcagcaaatatattatacaggcagctttccctctttcgtctggcctcataccttttgttttggtttgttgacatttagacaatgagattgcttatatttaccgttttgcccgattgggaaaatttggtaggaccgaataatgtacattgaaaaaaatgaagcattcaagaggtactcccgaaggctgcaggaaaagaagggcgcggaggatgtctacatatgcagagaacagagaaaacttcatcaattccgagacaatggaacgatagggatatcgggcagactctcagaaaatgtctgccttaactctttgtaattcattctttacatttggtacagggttgtatattcttgtctctgctttgatcagactcatatttaggtcaggccttgtcaaaaatcacatcaaaaatcgcatcaaaagcagtattcagtattgttaaggaaaatgatacatagcaaaacagaagaataccaaagacaataaggtgacaattctacaacggtactgtgaccgctgaaagatgtcccggtacatgaatcctgatttatatttttctccagtctatttgactttttttagtctttcttactatggctgcgaatgccatctggaagactatctcattttctttatcttaaaagtttcaaaagaaattacgtatattatacaaatgaagctgtgattaaagggaagagaagtacaagttgtggtgaacagctatgcatataatattggcgacatacgtctctttcgtaacagaagttcatagtagaatacctttgaagtagtgcccatgtcgttcttgaaaaccatactcaaaacgaagaagtccaaaaagtttggaaacgattctccacgactcatccaaggaaccacatgcgaggtagagattgtctcgaaatcagacggatcaaaactagcgctcaagaagttcagatcatgggatctacataaccatcacaaggaagtttgtgtgaaagaatatgaactactgaaaaaactgaatcataaatgcattatcgaagctcttgattgcaacaaaaggaaacatacaatcacattcccatattatagttacacagttttgtatttgatgaaaatgtccatgctaccgaccttcgaggaaagagctttgtggttctgtcagatatgcgaaggtattgcctacttacactcacataatattgttcatcgtgatttgaaattggagaatattatggtcgatgaatctctatgtaatattaagatcattgactttggatcagcggttgatgtcgggccaaacaaagaagcttgccatggaattcgcggctcggaacagttgatggcgccagaagtctttcaacgtcttaaatacgaaggtactccggttgatatgtggtcgttaggaatcatgatgtttgaatttttcaacaactcgaataaacctgctttcccgtggaaaattgctaagatagacgatgtagcattcgaggcgtatacaaagaacccaacaacacttaatatttccattgacttatgcatgaaactactttcggtcgatgtaaaacaacgtctgtctattcaggatgtcatcaatgacagtttctttcaagaaaatcataattccgtcgatggtgtctcagcgcatgcaagaaccaaaagaattttagaaagatcacaaactacatagtcctgtataacattatttctgtctgtttgaaatacctcctcccatcttcgtctattatcactaaactcaaataattttttacgttgaagtaattacaagtcatgtttggagttaggtcatatcctccaaggaacaatctgatgggaatagtctctcccttgactggagagccgtccatgatttcatatcttatcgaagtcgtatctgacaattgatttggttctgtcccgcatgtttcccttttgattagactcaattccatatgttttacttttaatctggtaagcagaaaatatatccttccaactataacatcttttaacgtgtgttgtgcctttgagtattcgaactctatatgaagacagttttcaattccgatatctaattttattggtttaccctcattatccttaatagaggattcattagcatacctatgacaccagaacttcttcaattttactatatcagccgattttcttatcattgtaactttaatataatacattacagatacgttcttacccaagtaactttcaaatcgtttttctacatccttaaagttgaatttgtaattaacagaatgtactaattcaccaggaggacacaaatccatgcttaatgtcaaaaaggtatctagatttttattcttcacgtcgttgttataaccagttgtatcaatactaccaatcaatgaaactttgatacctgaatgttcaagtttcttcccttctctgacacgcagtgttacaagcccagtcacactctccccatcttcaaataacggatatttatcaaataaactctttgccgagtgagaattggtagggatctcgacatgttttctcgaatcctcaccatcaaataggatttctatatcaactggattcttgtagaaaagtgacatattacgttaagatttcggcgtactccccacgaaagaatcaaatatagtgaataaatagatatctattcaataacaaaagtgacaaaggaaaactttcaacacaatgcggatcttattaaccattgattttttttaaggtatgcatgcttccttaagtgtgttctttcataataaagcattgtatgttgaatagcatttcatgctgatttctgaaaacatcaacgtgaatcgttacccggatatatcattatcttgcatgtactcaatcattattcaaagaggattttgaatacacttgagtactgcatgcagacgatatgaactatgtacagatttaatatgctttgaattaattgattaacatttcacttgttttcaggcgataactcctgcttcttactttggtcttcttttaactgaagagatggaacaatggcaggttcgaccacacgaaacttttgaagcactctgtcgtcaccttgcaaaggttggacccattcgcttcctcgttctttacctgattcaacccaactcttcggccaatctagttcttcgtatgcactcaaatctaggtccgttgttgtgaacggtcttgatttagcttctacgatagctagagtggaatgggaaacttgttcacaaaggaatcttttctgatagaatcttgcaatacgagttggaatagtagtgaatccacttaagttaggcactgcaacaacgagaagaggttgttcgaagaatgcaggtgcacctgttttagggtctattatgaggggtttcgataattctgccgggatggatgcatttgcgtagtcagacggaagaatatatggttttgagattttaggtccttctttttcttctgaggattcatctggagtagtttcaataggagtattttcagtaggggtagtttcagcaggaatagtctcggcaggagttgaatcagtatttactgctccagtctcattcatcgtggtacccacagttgctgccgcaactgctgtttcagctggttgcgtgactgagatttcctttacagatggattttcagttatcacagcagatgccgttgtatcggtaactgaggacgcatcgctttccacaaccttcggtggctcttctaagggacctaaaatcccttcatgtacaccagcaatgtactccttgtacgcacctcttccaacgcagattacacctccagccactgatggatccaatagcgagtcctccgtaacgacaggttgaggctcgttatggtagaatattccaagcacggatctggtatcgaaagatgcggctgggctttcttctgagacaggatctggggtagtggaaacaccacggcaccatttgaaccaatcgagccaagaacggcttttctttgactgagcatcatgttgttgctgctgctcctgttcaatcaattccttacgcaactggcgtactcttgaagcgatttcagttctaatttcgccctgcttggtaccactaacaatttcataatcgagtccacttgaatgaaggataggtttgatccagcgtctccaaagtttcaacgacgtatccaaataatcatttggtggcggagccaccaacacaagcaacttcctaggctttacgttggtggacaaactggaagacatttcatttctaacatggttgacgtacaatgatctaatttgtgattgttcgtatttatcgtaagcgataccggaacccgcaacggtgaccacagtaccgaatgccaaccatccaggtgagggcagtttcttccacatagtatgtattggatgatgaacgtggaaggtaatcacacaatcaacaactgaaacaaaaaccaatgaagacggtgtactgccggtggaaagtatatatgcatgtccaatagaacattcataacaatttgaaaattcggcgatggggccttttcttcttattgcattggaaagttcgaaggaatattaggtcacgtgaacagataaaccgctacatgatcgggtaacacctattgtccaaaagagaataattcatatgtaacacgggtaccctgccttaagatccacagtcgctcataagcgatcaaagatcaagaaaattgaaaatggccatcaggaaacggaacttacaagaaccctaacataacctttccagtactttggcttccagaaatacaagtacaaccgtcacctgagatgatatacgtattcaggtatccattatcaacttaactagctacgttaagcttgcacatcgaccatatggccaaagccaggctatagaaaagcccaaaatctggttacgactaatatcgacatagcgaattatctttttcacaaccgaagaagaacctatcgcagtttttttgtgctttatttctgggatttcggagtactgtttgatattctggtgtgaatctgcggttggaaccatcagacatcaagagccaattgttcatccttcacttttagtctttctcaagtcactttcttttctctttcgatactactttagttttttctcctgctttgacatattccaacggaaactggagaaaaattgtactcatattgcaattctgacaacgcattggaaataacttaaaagacaaattgtgatccatccctgtgttatattatctttatcgcttgaacatttttctttccgtttgagctctcacacattgtgcgcatagtccactgaaattcggtattttgaaattttgaaatttaagactaaaaatcaaaactcatcatcatacggacgacagacaacatccagtcatttcaagaatttactgaaacttgaagggattcaaaaacaataccagatagatagcgctttaataggcagaggcacaaatagatagtcgactgttatcaagatttcaaggagtatcagttgtatttatctgctcttctttaattttattcctttcagcttttgttcagacagtttttgaaagtttggtacaatatcccagaccagagaagcgatacagattctgatttaactttacaagtaggtttgcggatatatttatcgaaaggaaagacactaatagttacgcttagatttacatcgacacttttcttccagttttcattggtagtttattctttttgtcctttgtatgtgcgatagttttaacaagcaactgctgcagatgggaggaaactcggttcctgctcacaaaggtgttgttcatggtcatatccacaattacaataatttaacttatatccacggtcacattcacaagaacgatgttgaagatggagctgtaccggatccagatgatgttttgaactgtgctcagtaccaggattgcgagcattttgagtttataaattgccatagtctgaatctgtttggtgaaaatggtgataccaacgaaaaacagcctgcagtgcaatcgaactcttcacagcatcacctcgagcaacagaacgaacagaaaggcccacctcggtttgtggaaatcacctctgatgataaaaatgaagcagtaccgaattctctcagcaatgcattggacttcctggactgtcacttgacttgtgattcaccaatgttggaagatgaagatgaagacgaggatatagaagacgaagacgatgaagagggacgcggaaaaggacgcggggatgaagagtatacaaagaaggaactggacaagatattaaataacgatagtacttcgaatttaaacttgggtgctatttcacaacagcacttgcaggcattggataatggtgctacctcgagcaacaacaacagcaagcttatccacagtgagaatttcaaaattgctaatcccactctcaatactccactcctcaacgaggagaatggcaatcttactgtaggtgtggaccatctacagaatggccttccagaccctctcagtatcaatatgaaaaatgaacaggctcatcaacttgaagatgagatgaacagattcttgacacccagcagtactaattctcagaatttgagtgtaaaacgtgaatcacctaagagcataaacccttctgctgttaacgttatggacattagcgtcaaacacaacaataaccgtgatctcctaggtttgaaaccagaactgaagagcgaggaattgcacgatttaaaacaacaatgtatcgatatggaggacaacgacgatgataaggatacctcggtagatgaccagttatttgaaaatctctgttcccaatgtgttgtcaattacgagttaatggaaaccccacattttcatcataattctcactctcatattataaacacaccaacagatatgaaggtattgaaggatttgtctagcatatccacattgtatgaactgctaggaaagcacgaacacacccacgataatctaaatgaaaataatcctcaacatcatgatcatgtgtcaatgaatctattgcattgtaccttgaacggctacaacgaatacaatcatactgagaatcaacatatccaattaaaacaatctcacgatcatgaatgcgatcacgatcacgatcacgatgattctcatcaacaccctgaccaaaacatggatgaagataaagaagaagatgaaggaaagaatcatcattatcaccatggctgtgggcaaacccaagaccaagaatatgctcaacttcctcttcattcacatcgaataacttctgatttaaatactgatttaattgcgaatactatcaacttcaactggtcattcaatacaaataacgagcctatctattgtcaatgggatgactgtctacagccttacgacaacctgctagacttacaaactcacgttttaaaagatcatgtcgcaatagatgactcaaaagttttgtcgtgtaagtggactgaatgtgacttcaacacagcagatccatgtacaatggttaaccacgtcaatggaaaacacggtataaatttcgatgtgaaggttcttgacaacaagactatggccaaacaagttaccgctcacaaacaacttcatgaagaaccacaatcttgtatttgtaaatgggcaggatgtaacaaggaatttgattccgcgaagtccttgaatgaacacatagaaaatttccatgttccaagtgggctgagctcatacaagtgcgaatgggagggatgtaacaaagtatttgttcagaaacaaaagctaattcgtcatttgaaggtacattccaaatacaagccgtttaggtgtgcagaatgtggtaaatgtttcaacacacaggacattctcacgcaacatctacgtgttcactcaggagaaagacctttcaagtgtcatctatgtcccaagagctactcaacttcatcatcattaagaattcatatccgaacgcatacgggagaaaaacctttaagttgtccaatttgcaataagaggttcaatgaatcgagtaacttggctaaacatattagaacacataaacgagaaaactgccgaaacagcaaaagggtataaggaaagaaaagaactggacactttcattctccaaatcatatgtcttttatcggcgttctttaatctttcacttctcatagaaatcattctcttaataattagatgaacttacgatattcatcgatttatctattctattcaactacaaagcatcatcaagcttagattaactggtcacatatataatgcatcatccacaagacagttaatcacataagttatttcatatcactggaacgctaatctttggtttatgaaatggtattgtattgtgcagagttctttgctctcaacacaaaagaacgatcaaatagaagaaccaataccgtaccaatacgtaagataattacagtgacacaaattaacaatactttatcatatatttttagtacttaaaagatttatttttaaaagaatcgcatcagtttatccacaacatgtaataaaaaaacaaatccaaatcattaacatctgtaacatcaaatgcgactaaaagaaatggaccatactattagaagtagcaaatttctctctccagaattacttgggagaagaagtatactgtcaataccctgttttgttgattccagaggatgaacgattaccaaatcaaacccataatttgagaactacatggaataaaatcgttaattccattaagcagattgttgccccataacttttctgtattcagcaagatcttctctgtatttattctggtattgttccttagtggaggcatccaaagatttccatttagaacttgccagtttcaaaatctcaatttgggacaaccctggattttcagttctcaattgaggactcttctccttcaagaacgaaccgaacgaagtagcgggcttctttggtggcaaggtcttggcataagcttcatatgcagcgctgtacttttcccggagaggtttcaaagcatcaacatatttctgtttctcactttctgatagtgacctccactgtttccctgcaatcttcatagcgccagggttggaaacattgtgtgatgcgcaaatatgatcgtgcacttggctgaaatagtaagagaatgcagttggtggtctctttggcttgactgctgcttcaagagcaattggggaaactgacaaaaagcgtttaaatatcatagttgaatagttagtcgattccttagtagaatactttgttatacttttgaagggaagtaatagaatgagtagataatatatttaagcgtttgacttgtacaagaaacttggcatgggtttgtattatagcggatgattgcttgtttttaattgtttgtttttgttttggaagggtaaaaaaaaggtctcataagagggggggcgggtagcgctcgagaagatttctgatttataagtcacgtgtatgtccgattaagggtgaaatggacttgggttatcaaaattaggttacaatgccattcaaattattgagatttgaactgaaatgcaatgatcatggagaaagcgttagacggatagcaaccgggtgatttttgtcgaccaagtacttgctaatatcgtggtataaagatctgtgatggcaattgtggaatgttttatagtgatcgtttgattgcgctgcggataatattttgagtagagagcctttagattgattcccttaaaacgtcgtgtaataccgtaatgtcattggtagtttactcccaagatagagatctagttcctggagaaggtcagattgtggtttacaaccaggcgtattttgagtatttacaggctgaggatggttatgctgggtttgaggatggtgctagaagacgaaattctagaatacccgaagacatctttgtacaagggtactaccagcggttcttcaaacaggtcggagttcttggtaacggatcccgtgcagttgtatataaggtgaagcacatgcttttagagaacgaactaggaacgtttgcattgaagaaaatatgcattggagatgacatgcattggttgtatcgttgtttgaaagaagtaaaactcttaaatagattgacagaagagagttcgcatttgataacttataaccacgtttggttagaacgttgtcccgtagagtcattgattttgactcaaaatgatggatcctcagtaaatatggatatcccaactactatgccatacatgttcatcttacaacagttttgcagaggtggtaatttagaagatacgattcagtatcaggttttcaatagaatctccggcaatgaaagtcgattagaaagaaggaagaagcttttgaaccacaagaaatcacgaattggactcactactcgtcagatcgtttctattgccaatgacatagctacggggttaaaacaacttcattctctaagaattatacacagagacttaaagcccagtaattgtctattattggaggagtttgaccgtagtgatacagataaatttcctaaatgtgtcattggtgattttggtgaatctcaattgtacggtcaattgagagatgccaccggctccactggtacagtggagttcgttgcccccgaactcaccaaaggagcccagttcagtttcaaatcagacatatatgctttcggaatgatcctttattttgtgatcatgggccaattacctttcaattccaaagatatgtcagcgataaaacatgaaattaatgaactttcattcagtcctgaagccatgtccaaactacacgactcactagatctagctcccatagatccatcattatacaaccttgtatgtgaaatgttaaatcatacaccgtcactcagacctgactcatcacaaattgaatatcaactaaatatcatcatgaaaagtataaacaaaagcatcaatcaagaaccagagatccgaccttgttacttcaggtttgctaccctttatgccctactaatagcactcacgctcaccacattgaaccattcccattggaactggtggaaatactgcgttttattcattactggtttatgtttcaatcatggtcaggatgcgggtaaccttgatttacttacagtattaattgcgtcaaccatcatatcaatcatatcgatgtatgcttaagaaattgtttcatacacacatacataacatttataaatatttcacttatatcatcaattgaaacccatttatcgtttcatcaagtgtagtgcggaaaccctgtttgcaactagctggtactggttgtcaaatactcttattaaacagcggaatttggacaacataatgaagaaggcaagaaagagactattccataaagatgattcccctgtagcaccgcctttgaacatcgacgctttattaaagaatgtacactcattggaactgaattatcaagggtttcaacctagcgagaagaaagctctattgaggactatatctgccctttgcaaagaggttatcgaaaatgcgatgtgccacggattagacggatgcattaaactagaagacctaaacctgctgtttaggttttatgttgacttagagaaggagttcaaactggactttaacaaagatataaagaagatgattttagaaggtttagctaaatttgagaacgactttgttttaaattccaatgagaaagtgataaatgtcgcattaaagagactatgtgccatttgggcacgattctattctcgggtatatcctgactgtatgatttgtcttatacagatccctgcagatatcgaacagctcttgttaatatgcttccgtgatgctattgtcttgccgtactataagaacttcatgaatgcggatgaaggaatatcgatgagtttttctaagtatatacagaacgaagaggaaaacggcgtgaaacaacagcacaaacttatattaattcaatgtttcggtgtactcagctcgataaaaggtaaagacatgaatcaaaggttgattgaagatttgttgagtggagtaagacggagtatagaagttctatagaaatcacgtcacattttcaattaagaacttaaaaacgatatagaatatttactccatacggcaccatggtctaccggtgccaatttgatgtttgcatagagaaggttcgagaattatacccaaaaatgctgcaattaatgttcctaatgaatctgaaattgaaacggatccaagaacaaattccctttcatttggatcgacatctttcaatatattcatgaaacagttcacgtaagaagaacctccaattaaaccttcataaaaaatcaacaccatgatccaagaaatcgaatcagtccagtagtaataagattgtgatagtgttataagaagattgatcaattgcagcactgaaaagaggtacaggttcttcactggcaacttatggccccaggttcttgaaataaacacccccagttgataaagggtaccataagtcacataaatatctctgtatttaacgaaaggtgtagtatctattgggaatagaagcgttggcgcgactccctgattgatcaaatactcgaagaggtaaactgttgataatggaatcatatatggaatcacaagtttcgaaagcctcttcactatatccacccacccatttgatttaagcaattcgataggcccatcggatgagtcaataggcatatccaggctttgataaacttgcgatgatactattgaatcgttgattttgtagtataacaagaaaatcaatggcaaagcagcgtatagcaggagagatagctgaatgtttagtctaaagacagtcgttaaaagtaaatacgaaaatgaaccgacgattccggctcccccggtgccactactccagccagtaagtgatttagaaccaaagaaatgggtcaattgtaagaacgtgatttctccgaatcctgaagacaacgaagccaagacaatacctggcaaacataaccataaagatcgcgttgacaccaaaataattcccaacattgacaataaaatcaagattggaattcttttatcataatgaatgctatgaacgaaaaacggtgccgatagtttaattaaaaaggaaggcattatatcaaacaataacacaattgatttcgggaggctgggcccaatgatatctgaagccgctgataaaataaccacatataatatattattgataagtccgaacaaccagaaatatgcaaatgttttcttgtctctatccaattccattgaatgttaatagacgtgactcaaccgaaaaaactatgaatcaatacactaaaaacttcattcaagagtacggaatctgctcttactttgaaaactcactagattatccagtactcttcaactaaaggcaatacatccttccccttacataccctaaatattgtctacacatgcatgtctcgaaaatgaaagctgtaaacttattttttttttaattctctggccccgtaataatttgaaggatcaacaaaacatttttttgtttgttacaaacagatctacaatgaactaactttacttgtcaacaacaataacaacaacaacaaataaacattagtttccaaacaagacaagtatcaggctcctctgatcgtcccaagatcggttagtttgtgattttatcgccaaaataaactgttcacactgtttcgcataatttccacttgggtagcaatgagtaaacacatcgaaatgccagatatcgacattggagaatggattgattctgtatctttcaagaaaaacggttacgagattgctttggtatgcactagcagaggtgtttacgagataacatcacctgctcgtcatgttagccgggaacagaaacacaaacacaaacaatgcaaaatccaaagcccaacccacaagcagttgttgagcctagatgtaagggaccctctatggacgttacagaaacgcaatgatgggtatgtagtcattagcaatggctatgaccgttaccaatacggccaagcagatgtaggtgatttaatggaaattactgctgaaatttcacctaaaacaggacaccaccctcacaacagcaatgaggttacatatcggtctagattttacacagtgatatgccaaaacgtatctgaaaagaatgagaccattgtaagagtcgtgcacaatgatgtggatgacagccatttggaccgcaaccgcgaaatgcctgctttagtactcaatgataccaagattttacaaattgttcctgcatcacagggaagatacttgctatttggaacaaaagttgctattgtgaaaatatccacctcttccaccgcaacacgaaattttgaggtttctctgcttgaagcgtcaatggctccacagttaccgcttgctgtcggtggtcatctagagcttgaaaatgtagtgattcaatgcccgtacgcctccacgtcacgtgaaaccaaggtccgaattccgttaccacattgtctctcataaagatatggaaaaaacacaaaggcaaggaattcctctattccgcacgcttgggaattccaaaatcagtcctaataataatagcttgcacttgttccggctcctgccatgtccatgacgcgaaatctgtaaaatatgttcaagtaggggacgcgtcaaaacagcattgtagttccgtgtccttgcaagattttagatctgtataactgtgaataaccgcagtgagcggtaccagcgactaaaaaacggatgtgaaaagccaatatcacaatgaaaacctaggaatgaggataaaattagtaagattaaaaatccgaatctaattttccgctccgttaattctgagtaatacccagtgccacgttcagttgcaccaattcaatgcacgtcttgttgacgcagccaataatcagaaaaaaggcaaaaaatatacttgaagaaaattggccaaattgttttttcttttcactatgctcagacggaacacgaaagttgccctgcatgtaccctttgggaaactttttatttttttcttattcccgaaaacggaaaccacggaaacggcgtagagaattgaggcaagacagccaaatagggaaaaagacttgataagaaaagcatgaaatactaagaaagttccgcacacaagcaaatggcaaaggcatcttctaaactccatgtgtatgcgaaagctacggataagctatacgtacaggatatctggttaattactattttctgttctgatttttcccctttttagccaggtctcccatttctcgtccgcattgtctaatttttcagttttatatttttcgttcattgtccaaatctaatgcaaggtaccgtgaggggcgagaaaaaaaggcaattaacaaacatcaaagctgggttgtgcttgcctgttgatatcttgtaataatgaaatagctgtgggaaaattgtaccaaaaatagctcctagatctaatggacaatgtataacgatttggcgacttttagaaagagagtctgggatgatggatggagagggaggtggacgattgatatgacagaaaggatgaaaatgcttagagccattagtctactgaatcttctgatcttaatagagtattacacagttttgctggttaatgaataataaagaccaaaaaaaaaggtcgcaagaacaacaatggtacgtagagatctggtggtacctttatttcatgccaaactaactaggctcctcataatccgtttccggtcgccagtagcattggcattggcattgcaatttccagtaatatcgccgtggacagcttttgcatgtggatgctgtaaacggaccttttcaaatctcagtatcctctcgtgctacatgcgaatctggggcaatatgctagttttcatttttcaatcatttttttttttcatttcccttttaaaaatggtcccattaattggcgtttccccatagaaaccggtgcagacgggaacttattgttccttttgccaccaaatatctgatttcacttactaagaaatcagacaatatttgggttgtacatgcctttcaggaactcaaaagaaatgcaatgctaatgagtttaagttgccttcgcgttctttctactgtcaaccttattgtttgttattgttggaattctttttcaaagaatggattgaatattgaaaaaaaaaaaaaatgctgcactctatttctactgcatgcttttcactgtatttggatgctatatgttttgtttttacatacaaaccaccataagataccatcgaactaggatgaaaagaatgcagtttcatgacatgaactatttgaattcttactgggtgctcgtggttttgcaaagtcttcactcccattagcaaaaagaaaatcgttagtaataacacgatttcaatgctgataactcaaatagggaatagagtagaacgggatctatactcgtcaaacgattgagttatgtcgtatatggaaagatgaccaaattatgcgttaccacgttcagatacggctagacctttagtatggttggttgctatgcggctggccctttattctctttcttcggatgagattactggccatattggaaaaagacatcccgtcgttacaccttttcttatctgctactccaattctaagaaaggggtttcgccactgcatcgatgcgtatctcgagggtttatcacacacacctttttgctagaatctcattgctcattgcttattcatggtgttttattttttgctttaattatgtgatggattataatcgaataatgttcttgatatcctgaaatatataaaagcactgccttttccgcgactttaccattccctatttgactttggttatttgttggcctagccttcgcatatttctgttgatatagtttagaaaagtaagctacgtgactaataagaactagccattgccccaatgaaactctcttctttcgctttaattcaatctgctacattgggtttcttggctaccgccaacgctcaaattttttcaaacacctcttctgttgaaccatcttcaactccaacttctccagtcactggtcttgatgttgctgatatcaacattctaaacggctggactggttctaaggactcttacgaccgttacgccccattcatcttcacaattgacatcgacgccgctgaaaccggttcagtttggtttgctccacctgcagaattcggtggtttcccagaatccattgaattcgactacggtactattaccaacgacggtaacaacttcactgttgaatttacctccgttccagacagcggtgctgctaccatcgaattcgttggttctttgactgctgacggtatcgctggtattccaagcccagatgtcgtcacatttacttctgactcttcttccggttctttctctgacaacattaacttccaagctttaccagaaactgcctcatcaaacgttggtttgattggtggtgacttgtactactccatcaacgttcctgttgcagtcttcgacggtagcttatctgtagcttcctcttctgaagatggttactctttcgacgcaagttactctgctgtctacttcgtcggtactgatgcattcaacaatggtactttgaccggtgctgatggtgtcaatgaatctgaggaatcctctgtcctagtttctttcgaaggttccatcccagatggtcacgttgctgtcagagtcgtctacaaggccatcatctctggttccgccgaaagttactctaacaccgctgacttgtctctaccaagcttgccaggtgctctatctaagagagacaccactatcactttcacttccaccatctatgttactggtcctttggctggtaccgttgaatcttcttcctcttctgtttcttctgatgacaccgactcttctagcgaaacctctgccactgaaacatctggcgaaccatctgccactgaaacatctggtactgaatcaggctcatctgaaccaaccacttctgttgctaccgccaccgttactgacttgtctaccactgtcatcaccacttgcccaacttgtaccggttctcacaagactactgacgtctacgtttccactgttactgctactgtcagtggtattgtcactgaatacactacctactgtccaatcagtaccgtttctaaggttaagagtcacgaaggtaccgtcgaaacttgtaccgttaacattcacgaagtcaccagcggtgtttacactgttaagaccgaatacattccaatttccaagggtactaccgttactgacctgtctaccactctagtcaccgtttgcccaacttgttctgaaaagaccgctactggtaccactgccccagttgccccaggtactactgagaccggttccccagctgcctcaggtactactgagaccggttccccagctgccccaagtactactgagaccggtgccaccgccgctccaggtgctactggtaccactgccccagttgccccaggtactactgagaccggttccccagctgcctcaggtactactgagaccggttccccagctgccccaagtactactgagaccggtgccaccgccgctccaggtgctactgaaaccactactgttgaaggtgaaactggtgttacaacgattaagagtgtcactgttgttactggtgctactggtgctactggtgttactaccgctgttggtactactggtgctccaggtgcagaaggtgttaccactgccgctggtactgaagctggtaagccatccagcagtatcacaactatcagagtttccactcaatccggtgtttccacttatgaaggtgctgctgccaacgtgcaggccgggttggtaaccatcttgatggctatcgctgctttcgtcttataaattgatgaattgatttcatcaatttattaaaatcgtaacgactaatgttccaactatagttttggaacctcttcttcacaatcataacagttttaaataccttaccccccatactgttattttcgaccttcttttgttcgttcgttcgttctgagctttattttcacttcttaagttcaagcttactttggtacgcctttgagatcaacttttaaaattcgtagttgatgaattttcaacgtaacattatacaattaatttaataatccatatatataactgtcctatgcacaggctaaataattctgcacttaatggattctttattttcgttcttaaactagaaaaactgtatttttacagcaccaagtaatgaacacttgacaatcagaaacgccgcttgttttactagcgagtttattctatctgatcaacgtatataaaaaacaaaagcataaataattgcaatcgagagattactatccgatattccgtttacacacttttcataagtagtctttcaataatcttaatctttcgacagattcttctaaatattggttatctttgcaaaccgcaaatcttagcaagttttctgcagccttttcatgttctttaatgtagaattctgtcggtggaatcgcgacaacacccagttcattaactagccagtaagaaagcttgaaatcctttgccctctcatttaattcccttgggaatggatattcgtcaggtatctgaaccttgctgaaatccacacagacgaagtaagtaccgtctggtttagtatatggtaatcccaattcgtcaaaaacgcgtgtaaggatggcaaacttttccttatattcctctctcatgttttcgaagtatccattgtgcaacccaatatcaatagaatgtgcacatgcttcttggaatggagaaggcgaactgaagcaaattcttgtatgggcctttgatacgtagcttagtagttccgcatttcttgaaacgacccaaccaattctccaaccggtagcagcgaagctcttacctgcgctaccaacagaaagtgtcaagtcaccaatttccttggaaatagttgcgatacgagtaaattcgtccccgaaatacaaatgttcatagacttcatcactaatgatataaatattgttcttgacacaaatatcacccaattgtgtcaattcttcacgggtgaagactttcccaattgggttatgaggagtgttcaaaataatacattttgtcctctcattgatagttttgtttaagatatcaaaatcaattttccattcggcaccgatggtaaccctttcacttagttccttaggagctaccaatggcacataacgaactttaccacctggaatttcgatatttgagatgtactgatcgaagaagggttcaaacacaatgacttcatcacctgggtttagcaagccaaccaaagaagcgagtataccctcattggcaccggtagtaatagtaacattactctcgttcaaagtttcattgtaaatcggagagtagaagtcggtcaatgacttcaataaagatggcctaccacgggttggcgaatactgattgttaagtgggacgttcaaagcggagacagcttgttcaattgcaaattttggtggagaatatgaaaagaaaccttgacctaaattcaaaatcgatctgccttgattcttttcgttcttcgaagccgcttgagctgcttcattagtcaatgtccaaacatcctttggaacattgcccataaaatacttgttcgcacgaatgccagtcttcccttgctgtgtcatattggatacacttctaatgccgaatcttcgcatatacaaaagacaaaaagaattagctctgcttgatttaattcagggatcccaaattccttctgagagcctttccaataagaatatacatatatatacaattgaacttctttcttatctaattttgataaatcaaagagattagatgtttatacatcaattaagtaaagggcagccctgacaatgtatatatatacatgtaaaatatcaccaaacagcaaaatgcaaacactaaaaatcagattccccccaatggcgacaggtggtccagatagcagccaatccatcaatattacctcgctttcaaatcgatcacgaatgattggaaaaccggtgcgatataaacctgaatacctgcaacactgtgtctcttgtcatatcctgggttcccttctaggttcttgctcatcagtcacgtgaatcatatttcttttgtctagacgccacagttttctgtgttttcccgggtaatattctatttcagtcacatgacttttaatttatcatcctgtcttctttcttttcaccgatgactaccgaattatcctctcaccccgatttaaagcgatgatatttcattcttcatacatatatcatctttacaatatatatctgtctgcgtaaatggcattcatctatattgataatttcttttagacttcgtttgcagatcatctctcaacaaggtaccgctataacatacaacctacatgctttccagtataagaaaacaaagtgtaagattagtcggtctaagaccagcctttgtcaggttgaatcaaattagaacatttcaagaaagaagagcaggtccaccaccattaccaaaggaagaccaggaagagtttgaaaggctgcagaagctagcgtcttctcaagaagctattgattcttataatgcacagtttgaatcggatcatactatggaatcggtgaaatcgccaatcttgaagaacgatattggtgggttttctccagaatttatgaagactataccagagttcgaaggcgaaaagaatcctaaaacaggagaaattggtggaccaaagcaggatccattaaggcatggtgattattctttcaacggaagagtcaccgatttttgagcgccattcacacgttaaaacaaaattcggttagtagcatattcacataatgaaatgatataaaaagtagcacataatatagtaaggtatatgccagttttaaaactaaaaacgaaaaaaaaaagatatgtagatggtgattgctattataccgctagatcttcaatggatgcgcttaactcattcatacaagaattgatgacctttttgtcgttcagtaacatttgttgtagggaactaaattctagctcggaaaagaaatcgtctcctttagtagttgatctaagctgtgtgtccaaaaactctagttcttcgcgaagtttgtttgtcagatgtacatagttattgaactttaatacctggtttttgatacttttgaaccacactagttcggcctcgctgatactgcttgttcttaatttctcgttattttctatactggagaatgtctcttttaacttgtcaagtcgtttttccaacgtcttggacttttcctcatacctggaatatctttcttggaggtctcccaagtttccgttaagtttatttctcaacatttcgatctcgttggtttttcttaattggcgatggagttcagccacttcttcgttggatttgttgaacattctaaataaaatcatctgtcccaacttgacgcgcttcatggtttccttgtaaagttcagaaaccacttccaattgacgttcattggaattgttcttcaaagggagaggagccaaagagtccggtatgcctgaaatgaatccattggcttctgttttatacttcgtcaaaagcatatccaattcctttccagacgttggcaacgatggtttatatgtatatttcacttcatcggttctgtttatgggtttctgtgtggtgctcttgtcgttactctcgatgaccttgaaggaattgccgttgtaaagaatatcaccagacaaggtagataaaacaccgaggaaagttcctgaaactgttcttattttattttcaaacttaacatcatcaatgatagagaagtcatgaagccttatgcactgtgccaatggttccaaccatggcatttccatgatagtcgtggagctatcaccagtaaatactaatttaggttccgaggagtttagtagttggcattgaccttttgcattgaacattgttattacactaaggttattgaatgtagtattggagcgtaaactccaactcatgacaatttcagaatcggagaacaacacaacgtttgttccatctataaattgaagattcaaaaggcccaaacgttctccaaccggtatgattgtcaagcctgtgacctctttcgcattcaaagctgtcggaaatttttttataatgaacgggccctgtggtacagagttcctgattgctttgctcgtgaatgtgtctataccatcattttttttatagttgtcgaaaaattgaatttgtttcaatagatcatgctttaaggtgaggtaatcggattccacatcaggatctgaacctgatatcagctttagctgtttatcgaggctattgtataaagacaatgatttgtgcaacatgtaatccgctaaagaaccatttttcgtccttgatgtgacatttgatgtatcattactgcgtagggaaaaattctttggtagacacggatggatagcatatatgtcacagtaattgaaggagctcagcagataaagtgtcaaaccggttggatcaaatgcaatgtcacaaactgattccacatggtctgataacccaaatgatctcgatttacgattgaaaacagtgatagattcgggttctaggtcttcaagatcataaattcgaattgtactatcatcatgcaaaataacgaaagataacccataagtagccagaggatgccataatagtttttttatccctagactggtattgaaatgctttcttaatctagattgctcattcacttccatgacatagagctcgctgttcgcatgaaatgctacaaggccccccgacggactgatgaccatttgttctggaacgaatggaagctccacattataactcctgtattgcgtttcgtggtctgattgcactcttaagatgttgtcctgccataaataaatagtgttggaattgttgcagacaagacggtcggaagggttcagagacacttcctggaagattgccttcaaatcttctgtattgaagagtaacatcccactatattggttcaatatccggcagttaaagttatggaagagaaggtaccacagttagatcgccagttgatctgtgttacgtgtatttcaagaagcgtgagagtagttcatcgtcgatatattttgaatattttgaactttaatagtaaaaaaaaaaaaatacctatagcagatccagtattgcagaaaaggaagtgtacgaaagatatcaaaaagttatgttagatatgtgtctttatgtcatttttatatgtatatatatttacaggcgtgaatcatactgtgggtccgttaaatctttgctaagaagttattttgtttgatgttggcacggttggctatccttaattgtttttttcttagcttgattggatcagctgctagtttttcagcttggacgttggcatcaagcactgtccagagccattcagggtattcgctgtcttctaatgccacgggttccttaccggatttcttgatttgtaagttcaatggagtgccagctggacatgatgacacgatcttggcagcttggccagatgcctcgcttttcacttggttaaatagcacgcgagtcactctcaacatttctctctttatataatatgaaaaataaccgatttgttatggtgggtatgtggttgccgataccaattcgaacctcaacaataagttttggcaagtttgtcctgccttgcggctatcaaagttcatgatcatttacagtccaatttgaatttctatggtacaaaatgttgattttatcgaaatttttcattcaaaaactaagaattcacaaaacgccaagcagggtaatggcgaaatccatgacgacattatagagggaccaggccgcgtagtagcatagtttcgggctaaacacggaccaaatgaataggtggtaccttagtgcaatgcacgctatcattagacatgttccggtgatatagtaatgctgcaagcgtagtgtcttctgtttgtagctttgaggaattagtgagagagcccagtagatggatggtgcgtagttagacaagaacattaatacaccaacaacgtatatgttatagttgctactaacaccattgtatgcattagttagattgacagttgcaatggagttcgtaccaccaaattggaaaaaagtgaggttttgtagacataatgagaaaattggtgtgatgtccggtgtgacgctagtcagtatttcaaatattagaaacaatgggatatttgcagatgaagtttggagcaacaagacgaattttataacactcagtagtttgtttaacatattggtgcttttattcaaggcgtatttcatgaaaagaaggattataatagatacaccacatatttggaagaaaatccgagcgataggcactaaacattgtgaaatatctgattctgtagcattttcattagctagatacatggcgcatgatctaagtgcgaatgtgtatagaccgcttgggactttatccccgttaacaatagcaaagcatattttgtaagttatcgaggacaaggccaaaaaggacacggagagtaatgataccattttctctgattcgtctttgtttctcaaaaatgggaaacccacggacaagaaagtcactacatttaaccaccataggactgatgtatgtgattttaaaagagtgtgtagaacattgtcgtatatatatttttggccactattgttccaaccacgaatcagccttaatccagatagcacaaccagttttttcccgttcgatatttgcatcagtagaagtacggatatcgtgatccaccaccatatttgatgttcttcttcaataaaactacttgcaaacatgcttattcctaatagcaccgaagtaccaacatgttcaatatattcctgacttagttggaaattccataccgtgactatgagcgttccaattatcatgagagtagtaccataagttaagaaagtgtaattgtaatttgtagcagccattgctaaagaagattgaatttccctcatctcctccaacagagttcctgcacttttcttctcgagttgtgcttcatagcctggtttcaacttagttaactgtagataattatcttgcactttaatcgctgctaacttggatggaagcaattgcaggagctcatcaattataacacccatactattcttaggaattggaagattgaaaagcatactcaacgttggaacaatatcgatttgttctacttctttcaagtacttgtagtctggatgagcatcttcaacgggcacattagaggattgctgaatatcagagctttgatacttttttaaccttttagacaagaacgctagggcagcacttgtttcaccagaagaagaccctccgtggtttcccaaatcattcatgccatgatctccaagaacaaccatcagagtatccccgtcaattttttcatatatttgtttgatcacagaatccatttcccgatgcttcgatggcatgaaatgggacttagaaccacctttgtgaccaatatgatcgagacctaaataatgcaaaatcagtacgtcccaattcttttgatgctccatttgataaggcacatgtctggtaacgttaaagtccacttcttcgaaatcactgacaaagaaggagttagtaccgtcatactctgagaagaactctaacggaaacaattttaaccatgtgtcatcgccaaagaaattcatcttgtagtggtgcgtgtgaaattgcttcagtagcgagtcttgttcttttaggtttgatgatgtatcatcttcagcaacatttagaatagcatccaagaaattcggagcagatcccgtcgttatccccttcaatctcggcagagttacagttggcggatttgaataagctgtgtagccccaggcctcgcctgagttcaatagtccatgtaaaaattcgaagtctgaagaatctttctggaacaagaaatcactccgcagagcatcaattacaaccaacactagtttcttgaacacgggtttagaggccagttgtacctccggattcacaatgaatttagaatcattcttcaaaacaaccttttgcggaaagaatcctccacagaagagaaatacagcaaccaattgcaaagtggccagcacatagtataattttctacccatgatggattcagctgtgtgattcaattcaccttgtcactactaaccagtttgttagaacaactcaacgctattcccatccaacgctgaaatgtattgatgtttacgttacgtctttagagatttttcatgttgagagagatgaaagaaaggtaattgaaggaattttagaagaacagtaacaaaacaaacaagtgaatgaataggtgtccgatgtagtgcggaataatcatatttcatatatacatagcaataataaaaggaaatgaccgaatatttaatacggagtatagaggtagatttgttaaggataatgcaatgatctatatatctaaatactaaagtaaaaccgtaaacccaagtgcatatgcaaaaatgttcttcatcacagtgaatctactgtaacaattggtctctgtaatgaggttggttattaacgaacttggcagctcttttatcgtctcttttcttgtctttgacttctgtttgccaagtagtcttttgtacttgttgttgttgtctatcgaaaatggtagcgaagtgtctggtgtctgcagcaacgatagtaccttggccctcactaagttcacgctcaggtttaagattttgtctgtaataccgttgtaaggttctgtgaccaaccttcacaccagtaggtagatgtaattcgacaccgtcgttgtatagtatatgttcaggtaattcttcttcttcttcatcatcttcctttttatcattctcaatatcaccgtcgtcatcttcatcaacatccacccactgggattcatcctcgttgacggctttatctaactcttcataggtactcgaaaaatcataaaactctgatatttccaacttttcagcttccgtttcgtatggaatacggcaatgctttttcgatagcatatgagctctgaccgcttctaaggacctaccttggtaagaacagcagaaacacatattacccaaaccaatcttttccgaaaagtatttgaaaagaccacttttatcaactaaatatttctgttctggaatatagaaaccatggtctctgaacatatgatccaaattttcttcaaaagttttatacttcttaccggtaaatagacactcagtttctggaatttcaactctgttatgaagcttttcagccattaacttctcagcaagttgatcgggggtcatttcttcttctggaatctcttctgctttggatttggcaacttcgtccttctgttctgcttctacttgcacctcaggatcatctgatgctttattaacaggagtactatcttgcatgttcttcaacatagactccttagcgagctgcaatagttgctgcttcttggctagtaacttctccttttctaacctacgcatctccttcttcgtcatctgtttaactttatccttcttatgcttgttctcttcttcttccttctctacacgagcattagcaaccttttcactaaaagtagcttcatctatggatggcaaaccagcgactcttctcttcaaattgtatctgtgccagtccgacttcatgtgctctctttggccaaccgcagtgtcaaacacaacaccgcaagtgttacaagtatatccagccatatctttgtcctttaccttagttcgtgtaggtttatttctcccgctccgtcgatactaaacaaagcaaactaatatttaataatgttgctccaagaagtacaaaaataacaaggctgttaattactgtttctcatcactagccacctgaacctattcgatgagatgagatgagatgagcttctataaaattttcaaacattcacgcactaaaaaaaaaagaaagattccggcgatgactatgggtaaactgtccccaataggacgccaatgatgtaaataaagactactcgattcgatccactggctttgttctatgtgagtcgtttgggaatatatttcatacttagatatctagctctctcagggtatatagtaacacactacttagtatctttattccttttccattgatagatttggaatttgcaaatcaacatgtagataggcacgatggtaatgttcaacaaggcacctaggatccatgaaaacacgaacatgaattggctggtgctatgtttgtttaaaccttgatcgcacgccatcaatagccaaccaatagaatctgtggtaatatcatcaagcccccatttcaatgacgagatgatcttgtcacgacattgggcagcggtcactggattactgggtccctcaatttcttttgtaattgcaggtttagttatattttctagatcaaagccctcactttggaaattacctgggtacacacaggtgattcttgtacttgaatgttcctgtctcaagattgcaaccaaagatcttatactctgtttcaaaggagcatactgagcgtatccaatgaaaggaaagaacgctacctcggaggaaaagaacagaagatggggcacatcatgctttaaagaaacatgggccaaattcacggcggtggaataatttgttgtgataccgttttgtaattcttccggtgtcaaatctaagaacagttttgggattgaccccccagcacacatgtacacctgtgatggaaccaattcactcttgaccagtagcttgaacatcaatgctactttgtcgtatgatgacgtatcacagctgtgatatatcaattttgtttcatttctattggtatcgttgacatatcggtccaaagaaacaccatcaacgccaattctctcacaagcctttaccagcttgctctgagacctggacacaatgataaccttattagtattcgaacctggtccatcatcgtcttgcacaaaccgtttcgcaaaagattcgccaagcccctgtgacccaccactaatcaaaatcacctggccgttacaattgaatcctttcattactataaataattattgaaatatactgattcacaaaaaatcgatttgtatatacagggcggggaagtggacaaaatgatagacgaaggaagctggatccactagacttctacgatcctacctctttgataatcctctttgaaaacttaattcattatagatttccttctaaagctggtgaaaaaaaatcatgttgaaacctttgcgtaaaaagaggtagagtaaactaagtgcagattatttttgagcacgacggattttctcgagctcgtactccttcttcaactgttctagttctttttcgtcaataggaggaataggaacatctgcaaaatcactatctttgttcaacatcttgtatgtatatgtgtatatcgtaccagtaacaccaagaagtataactaatcccattaggttcttcttgaagaatggctgtctggcacggatcattgccggagtcatcttccatgtcttgtggtcttggtatggactaggttctaacatttctttactttatctgcctgtggtatgctggtggtctgctggggttgtctcaggctcttcacagatcaaatgctgtagtttccctgattctcttacgttttatatctttaagattttcaacttttgaaaagtttcttagtgaaaaagagctaaagagccaatttatttctcatttcgaagtgatgaagagaatggacaatggaagtttcgcaggtaaaacgacatgcctggtaagctttctactctaataaagtacatttttatataccgcagatactgctataattggctatttgcttgaagtgaggaaaacagatctttttagagttatatcggttcagtttccccttctcatcgcatattttaccagtacttagttcttttttctttaacttttaagaaaaaaattttcgaatttaatgatttagatactatgcaagtagcgaagctacattaatttaggtagaagttagtcactgttgttaggctattttttactccgagagatccaactaatttaaatatgactagaggtctagccaggcatttgtccagaaccaagccacatagggatgcgttgatcagaaatatggcaacacagttgttgcaacatggcacaatttcgtcaacaacaccgaaattaaaggaaacacaacgttacgtcgaaagaatcattaccattgccaagaacggtatacagaatggtaacccttcgagcagcgtacctgaattacaaagtagactttatttatccggtgacaattcgaaacttttgaaaaaactgttcgatgaaattgctccaaggtacaccgccagaaacggtgggtacactcgtgtgatgaagttggagccaagacttggcgatagagctcctcaagcgatcttggaacttgtggatgctccagtacagaacgaagacggtcaactattgaaagggaatttgaaactatggttgttgaccaaaacttgtatgcaacaaatagaagatgctggacaactagctccaaaaacggtgcaaaacttaaagaaaatggtgcacaacaagactctagaccaattgctacatgaaatcggtgttatcagaaaatatattcttgaatcacaacaacagaacagtaccactgaagtatcagaattgccagagtttgacgaaacattacaacaacaatttttagctgctgtgaaggatcaaatacaaaatcacacagcagaaaagaagcaacctgatggatatgttttcagagaaagacctacccaaggttaaatagttttccttctaaaattcatccgattttgtttatgtactgttaaacagtgtgtaacctataaaacctgtaaatatcacgtgactttgataagttgactggcagaggcttcggattactttcacaggtaaccaaggcaaaccaggaaaagatgtcctttggagaaaacaagattgcttaacttttttacaaaccacatagttctttatagcttcaattaatcacgaatagcttctccagtttgaaaaccgctctgatcttctgaccactagcttttattcatatcaattgatatcttgggaactcttacaagaaacttcaccggctgaatctttcacctagcgttaaatgtcgcaatttattcgtcgcttgcacgttcctccattggcaaataaaggtttcaccgatgcaatcggtagtaccccattgatcaagatacagagactatccaaagaattgggaagaaatatctatggtaagtccgaactacagaaccccggtggatctgtgaaggaccgtgctgccctgtatttgattgaagatgcagaaaagaaagggttgatagatccaagcagacctgtcactgtggtcgaaggtagtgcaggaaacactgctattggattagctcatatctgtaaagcaaaaggttacaacgctgtcttctatatgcctgatacccaatctgaagcaaagatcaacttattgaaatggcttggtgcagaagtgtatcctgttcctgtttgccccatcacagatcctttaaactttaataatagagctagagaccacgccaaaagattggataacgcagtatggacagatcaatttgacaatcaatcgaactggaaagcccattatcacaccacggctcctgaaattctacaacaaatagaagaagcaggcatgatgttggatgcctttacttgttctaccggtactggtggtacatataccggtgttgccaaatttctgaaagaagccacgaatggcaactgtaaattagtcgtagctgatcctcctggatccgtcatttactcttatatcaaaacccgtgaattgaaaagggaaggtgggtccttcaccgaaggtattggccagggaagaatcactgaaaatatgagacaaagtgtcgatataactgatgatgctgtgtttattccagatgaagaatcaattatcatgcttttcagactattggatgaagaaggtcttttcgttggtggtaccacagcactaaacgttgtcgctgctgctaaagttgcacaaacactacctgaaggcagcaatgtggctaccattctatgtgactcgggtcataaatatgctgacagggtcttctctaagtcatggctacaaagtaaaaagctttatgatgttttgccagaccacttgaaaaaatatgcctcattagaatgaaacctttagatcgaagagactctcttagtattctatgttggtttgaataaaagttaaatagttgaggattaatcactatcaaagcaataattaacatttatatatagttactattcaattgagaaatgcaacgacaaatcatattccaatcccaagtgacatccggatcatgggattcatagagctcttgccattttaacaattcatagacaaacattaaactgggctgaatgataatattcaatcttcttactctaacataaagataagctttcaataatccacagtccaaccttttcatacattcggcaatgcaaaccgttgcactacgagaaacaccgaccatacaatgcacaaacactgcttcatttttccgataacattgatcgataaaatcaagcaccatatccaattgatgaagcataggatccattccgttatcaccaaggttgtcaatatgacacactctaaatccatcttgttcagtaatattgatgaccgatgctgcttgagaattagcggtaggtaaaacattaaacgaattgctccgttttctctccatatttcttgctggtaatgtaatctcttcattaacagtattagatcttggtctacaccacgaaacggattctccaacggagatgatatttcttattcctaattcttttaacatttcagggcattgtgcatgtttaagggaccccagatataaatggggaaggatccttgacggtaaaggacctttgcatttcaagaacggtgaatcagttggtggttttatgaagaatattttactgaaagtatccgcatctatagtcaatggtagctttggatcggtcgtttcatttctcatgggagaatactgtcttaatagtgtctctagatgtgataaaacctgaatgtcaatcaagaacaggaagaatggcctgtcatattttttatgcaaatcgaatatcacttcatctaaggatttgtcgagtttaaagatcaaatatgcaacgagtaggaatgatgtctctgtgtatccatctggcgagaagactaatttgttttgcgggtagaattctaacaaatggcaaacgtttaaaattgtttgaatggaatctaagtttaaatttcccagtccgatagagccggaactaggaaaactcaaccagacgggagtatccacaggatgtttgattaactctgaaattttctccaaagacggcagttgagcgttttcaaagcaattgataaacaaacgccaatcattagtctttgaaggaatattgaataaggcattgtcattcaaatcagtggcatttacaacagaatttgatggttcatagtatgtagtcggagtttctagcgtgtcattttccgtaaatttaccaattttccaaatttcggcatcagttgaattcccacaccatatattttccactttggtcgcgctgctcatcttgctcacctccaatctctcggtatagtacatatcacgatcccagtttttgaacgtagctagatcaaaatctgaacagaggccttttttggtttgcaaagatgacaatagtattggcggagttccccaaagtttatcctggatctccccacgtagaattttgaattggcattccggtaacttggccaatcttcgggcccattttaaaacattaattagacgatcgcaacaacaggagtctgttacgcaatacacgatacaatgtttagttaggtgaaactgcaaagatggttgtaaatcgaatcgacggaacgtacgaggctgcttccatttctgataattatttctcacgcaattgttgtcgctattgtaaacggagtgaaatgggtccgtttttaataagggcatcgcttcaaacaacgaacaatcctcaatcaactgcaaaacatcttcctctgacacaccttctagcgatttgagtagatctttcactactgtatctattgttgtttctttgcctattggcaacaagatatcgaatacttctaaagaggatttcaaaaggccagaattctcgatatacttattatctcttatgttggatcttatcacagagaccacaaacctatcaaagtctgaatgatacggttcatccacataccgctgaggtaaaacttcctgagtatctccatgtaaccaggggaacattaccgatgcatctggtaacggacttttccattgattattcaaaagctgccaaacttcttcagaaaagattgtatctttccctcttttaaatggcatttgggataagctctcgctctgtcgcttcgaagtaatctccggtatctgatcaacttgcatcctgtagatagatctctccaattccaacaaaacgtagagagcgctccaaatacacgttgccctactagctctatcttagaagatacttttttcctatgacctggcgttcaggtaaatagtgcacaccgatctcttcgaataggctgcaatggcaccttatcagagactattaccagctcacgacggtagcctattccgtttgttctccagccaacattgtgagttcttgtcaaaactaggattgacaaggaatttctgagattagggtggggttattggtactgacagaaagtaaagaaggaaaataaccgatattgtatgtggtgttagggtgtgttgtcaatgatattccattaacctatgttctaccaccgttttggagtcgtgaccccattatcatctgcccggtagagtgtactattctctggttgacttaatgagccggaataccctctttggtaaatgttttgctcatggacacattatctgctttgaaaagtcattatgcacataaaacacgaaacactttgaaaaaggctacaatctaagcttcaaaagcgatgtgctggataagaagaaggagacaatagcagccataaacgatacaataaccacaatttacttaagatggatgaatataaaagtaaactaccgagaattcctatttctaagtgcaagaagatcgccaggacagatccagagtacattttgaccagtcaagcggcttttgcagctaccgcattcaccacagaattgttcatccagatgctagcagaggagacctgttctctagctcagatacacaagcaaaccaaaactttgagattgaactatgaagacctatctaccgctatccgcaacctggataagtttcaattcttgtcagatgtcgttccgcaaactgagaatctggcctctctggtgagagaaaacaaagtcagatacactattgtaaatcctagcccggaaatagatatagaaagtgaagatgaagttgatgaagctaatgaacctgaagttggtgaacctgaagttgatgaagccgaagttgaagctgaagttgaagctgaagcagctgaacccgaaactcatacccttgatgaacctcgaccagaatcatcgtcctgaacatcggttctcgaaatttctctactccccaaaaccatgtttctgaccccgaaaaatgcactccgagttgcgcccaaaaaattctggaaaacatatatatacaatcagagcaagaccccaatattatatatatgaatacgtgaatgtccttgagttagaatgaaatggtcgcatcagtatagatgtggttattttgttccaagactatcaggatttttgaagactattgaaatatagttactatagttggttcatcggaggatcaataatacctaagatcaaataaaaaaggaacaagagcgagattataatgggtttatatcgtggatccgacgataaagattacaagggagaaaacgaatctgtcgcctttccaggcgaggtttgggaaggattgctatccagtggtgtagtgcatgatgtgttacagggtcttggattccctggtggatgggcatggaatatcgataaattggtcgatgatgtgaataacggaatcactaccaggacaaagactcccagcgtagaacaattttcgaaatgtaacgagttgaagggtgtttctgtgtgggatacaagaggcctttggagatgtcttttcccccagtcggtagttcagaatggtggtctctcgagagaggccgttgaagctgacaaagaccataagctaggtcttttcttccctgagtattctgggtttttgtcgtggagagctcacatgatggcattggcgaagcagaagaggaaagaggaaagagagatatattccttgtctactccagaagacgtcatgctgaaccaagtcgactcgttgggaaagaatgtggtaggaacttcgtcttattcgacgtacaaggcaacaccagagggtaaagaaagaatcaaagaagagaaaacttactatgaggacggtacagtcctggtgaaaactaagaagaagatttatccccacgatggggaaccaagagtggaatcttctgaaaagttgctaaataccgatgaatcgtcctaaaaaagtactgtaaatagaacaatttgaagtaatacattgtatgcacacatttatatttcttatgtaatgccagaattcatgtgaccatgaccacctgcaatgctctgcctcaagaacgccagaattaccttcctcgaggtggtataaattccgttatagctctcctttactggttcggtgacaattttcctttttgagaaaatactggccggcattatcaatgcaggctctttttcactatacgaaccttggttatggtttagggaacctgtagtggttgtaataatgattggggtggagcggagtactttctgactgtattactatcgttgccgttgcattagataaggatacaccacatcgataagatgcatcatgaaatttcattcggcttggagcaatatataaatggaggcgatgatggtatgacatattcttactcgttgaagcaaacaagtgcgtgaagtactctttgcgatctgtataaggaaagatctatcctcaccaaggtcaaagcaaacctattcctctaaacatgttaaaaggtggtgaaactgctcaaagctcttcagtctggttgaaaagtgcactggtggcctctgttttactacttaccggattcaagatcttctctcaattggaaacttcgaatgacgtcgttaccaatgtgcaggagtttattccctattgtagagataattatgagccgttggcaccaaaagttagttcaaaattcttgaacaagatagacaaaatcttgaacaacaaagagttcaaagatgacgtcgcagcaaagctctctggtgcagtccaaattccaacagtgattggtgatgttttccctaatcctaaggacgacctggaattttattctgagttcttcaagctacacgattacttggagaaaaccttccctcttgttcacaagcatttcaagaaggaaaaggtcaacgaagtcggattgttgtacacctgggagggttctgattcatcgctaaagcctgtgttatttatggctcatcaggatgaggttttagttaatccagaaactgttggcgattggaaacatcctccattttcaggctactacgatggagaaagtgtttggggccgtggttcagcagattgtaagactaccttgattggtgaattagtggcaatggaagagttgttgagagacggcttccaacctcagcgaacaatcatcttgctgttcggttttgatgaagaaagtggtggtgagattggtgctcgtactttgtctcagttcgtggaagaaagatatggtactgatagcatattcaccattatggatgaaggggccggtgttgttgaagtggagtcaggactatatgcagctgttccaattactcaggaaagaggatttggtaacattgaaatcacaatttcaggtccaggcggacattcctctgtaccaccaaagcatacgaatgttggtattttaagtgaactagtatacacgctggaaaataactcatttgattacgtgattgaagacacgcatccgtttttatcctattaccaatgtgttgctgagttttctaataagatagatcctggcttccgtcacataattaagaaagcagccacttcatacaaatacagactggaatttgtaaaagcattggaagtatttgatcctttatcagctttaacgttcaaaaccaccgagtctattgacatgttccattcaggtgtcaaggtaaatgcactaccagaaactggttctctggagatcaactaccgtattggcatgcactcaaacgcaaaagaggtgttggaaagaactgctggcattaccaataaaattgctcaaaaccatggatacaacttgaccattgacggtgatcgggtcatttattccgatcctcagaatgtgggtactttgaacttgaaaatgtacacctacaaagatccttctccaagatctccaagttatcaagataacgataaagtctgggatcttttcgcaggaactatcagggattactttgaaaatcgtgtgttatcaaaagatgagccatccaagttattcattactacaggcaccatgactgcaaacactgatactagacatctatggaatctgacttctcatatctatagattccaaggtgcgatattccctattgaattgttcgacattgttcattccgtgaatgaacactcaccagttgctaatgtcctacaacttgcaggctttatctaccagtatgtactaaatgctgatggtgctgatgttggtttctaataactgtagaaattaaataacaaacaatataaacatgaactaactatccttagaatatgttaaaccgtaatattcaaaattgtagttatcctatgcagaactgtcgctctggtggattggttactgtctggtctccattctatatctgtcgtatattcgggtaacattgttgtccgggtgacattattttcttgtttgattttttacttttcaacaatcaaacaaaacctgtcaaagcatagagaatataagcttggaagagtagaactacctgtgaaatacagcctagatagagggggtaacctttgttttcctgttgtatcagagggcagaacttctgggtgggagataaatttatagagaatgtcaaggcaggagcttatcgcaaaaattcgttatgaaaacgagctaccagctccgcttttaccaccgaagttaatcaaataccaagcttcgcctgatgaagacgtaagttccagcaaacttttgacttcattgtacactaagaccaatgttacaccattaattgatttagaccatgatttggggatgcctctcgatcttttgacgattcccggtgtattaaaccaacaaaacgtaggtggattgtttgggtacgataatattaagttgaagcaagaagatagagtcttattgagagatccaggaatggataaagtggtacagagtgacttatcgaaggttaccttcttgagaagaactgaatatgtcattagcaccaacatgtcgaaggctgacaaggtgaaaagaactcgttctgcattgcaaaatgaagaaacattgactccagaacaagtcttggaaaaagtggaatctacattcaatcacagaactgacgaccttgaaaaattgcgtcatccaattaaaaagaaggtgaaagctgttaactcttggaaccttttaccagatactgtttcgatggatcaaggttactttactgtcaaatttgttggttccgctgctcttgatggtaaagaaaaggaaaaatacgacatgagcactgcgttactcagacccgttgaacttgaagaagacgaatggatcagtgcttactctacagaaaaagaaagttctaccaagctaagtgaaaacttggaacagcaaatagatgagatttctcacgacgactccatttacaaatttaaaaggttcagagatttcgacatgaaacaaattgaaccagaaactcaatcaagcgatttagctctaaggtatgataacgacaagcgtaccgtttactataaacctctgcgctctagattagagttgagaagaagaagagtcaacgatgtgataaggcctttagtcagagaacacaactgggatcaaattaacgtcagattaagagccccaactaccaaagaaactaaagtaagggacgctatcaggatgagatacgatccaattgatttcccagcgcttgatgacgatgaggaggaagaagaggctgaagataatgaggatagagactctcaaaatggagaggattctcaaaaccagggactcgcttctactgaaaatgtaaaaccgactgcatctgacgaggttaaagaagagtctgttcaatcagccactaatgaattagcctctcaaaaggatgaagatattaaaccggaatcacctgtatagtttacctctggaggtagaaatacggtgggccctggtcaaccttcttccaaaaaattggaatagaaaaccggttaatagctcatcccatcaggacatgtctactgcagtaccagatcaatgatccgtcaggttcttctcctgtcccaatcaataattgacgttaatatagacgtataggtatatatgtaattgtagcatactcatctccccagcgtaggaagcaaaaatgaaaaaaaaaaaaaaagatagtcatgatgaagataaagaaagagttctggtagtagggaacctaagttttgctcgaaacagaagtggcaatcagtacgctcttttgaactaaaccggcagtgcgtatcaattggaacaaaatggctttaaagatcaattctgctattgccgtgtgcggcggtaaattgttgaagttgtctcacttttcatcatgtacaggaacagacatggatgttaatttgtatttgccaaaacaatattacactagcattgacgactcaaaactgattcctagtgtcttgtatttatctggtttaacgtgtacacctcaaaatgcttcggagaaagctttctggcagattcaggctgataagttcggctttgcagttattttcccagacacatctccaagaggagacggtgtagctacagaccctgagggttcatgggatttcggtcttggtgctggcttctacgtcaatgctactgaacaaccatactcctctcattataaaatgtatgactatgttcacaaagaacttccggaagttctggctgaagaatttggttccaaagttgatttcttcaagaatatctcaattacgggacactccatgggcggtttcggtgccctatcgggatatttgaagaatatcaacagatataagtcttgttctgcctttgctccaatcgtgaaccctagtgctgttccttggggtcaaaaggcttttacggggtatttaggttcttccaataaagaagcttgggatggatacgacccaacaaaattgataaaacatgtcgagaatctcaatggaaataagattttaattcatgtgggctccaacgatccatttttagaaaagcacttgaggcctcatttgcttcaagaagcagccaagggtactttttgggaagggaaaattgaagtaaactttgaagatggtttcgatcattcttactacttcatatccacgtttgttcctcaacatgctgagttccatgctaagcatttgggtttgatttgaatgcaaaagaatggttttaccaacaatttgcctggattgattcaatttttctcaaatacattatacgttaacataattatgtaattatataattatgtataatcatgccatttaaaattcgatgaagtgtcaataatgccctgacggtatatctgtcctttgtaatcaatcctttattatgattgcacctgattgccaaccacccgccgtgattgcaacgcatgttccatctatgtcaacctttgtaggcctctggaccctaatgcttctcgctctttcaaaagttccagctccacttgaaacaatagattccggttttccaagcccgagacatccacacatttcgctttccaatccccatgtgtacatgtccccagtgtctgataacgcaattccatggtagtcaccaaaagataaagagatgattttcacatttggtgtgatttcaatcttggttaaagtgttatgagcaacttcgctgtctttaatttccacggtatagcatgtatcacttgtgaatattgctaatgtgttattagacgcctgaacctttaccatttttccctcaataggtaaatctatgtacttctctatctcatttgagtatagccatagcttttcaccctcatttgtaatgtaaaagacggcgttatcggatccgcacgcaaagtccactattttattggcgccattcacttctcctgtattgggaattactttgtaatgagcattagcaaatccatcaaaccctacagttgtatcccttgatttccacacgactaaccccactccatatataaaaatgcagttgcagttccaaccgcaacttatcttcaaaattggattggtacttctcattggtaaatcattgaatatcagctttactccgtggtttacctctctaccatcccaagaataaagatcatttttgtcatccaacgcaagaaaatgtgatctacctgaacttactgcgacgaacctgacactgtcgatcattgattcatcaaaatcttttggatctttcacattgaatattgactttggaagcatccgcctcacttgatcatttcctggtaaacatttcgagctaatatcactaagtttcataagatctgcatatatatcttcatgctgttgaaaagttcccgttaagtttgtcgtatggtgtggattttgaattcttattggatcaccaatggagcccatgactctgaaaggtccatgcactaatggaaaacttctttctaaagaacggatcgtttcatcgattggttgaaaatcgtgttctccagcaagtggaccaggtccattatgtccgccatggtatgtggcccctgttgaatatagctttcctgactgggtcaagatctggaaggaaaaaccacctcctgatatttgaacaattgatctgtcatattcacctaatatgtttgtttcttcctcagtatcgtcatcatcccagctattagctctaccagatattggtacagaataaagcatccaaggaacttcaacgggtttacaaactccgaatgtaattcttctatccagctgattcatggaatctgcagaaagtctactattagagctaattgtgtaaccaagtcttccgtgctttatgcatccccaagtgaatactgcgctccgatattttctgagattgtacaacttgtcccattcaatgcctgggtgagtattcaacaatatcgtttcgctgcaggtttgaaacctctttgaattcttcgagatgaaaggctcatcattcgtataagtattcccgaatgacttcctgaagagttcatgccatagaatagaagagttagagtaatctagcaacttgttgaagtatttattggtgagagatagattcttaatatcctttgaggttaaataaggtaatattgtctggacaatatccggaggcaagctttcttttatttcattggatgttggtgcttcagacttcattattagtagttgaatataaaatcctcagctttttggatacgctacggcgaactttcaatggtacgacccctgtgttctagtttacttatccatacttttatgattcaattcaagggagctcggagatatctgaatcttcttttgttacccggatacatgtggatgccaagagagatacataccaatcagttgaagagttatgtaaatttgacgaaggttaggctgtcagaactctgcgttggtatgttcaaatatattcattaagtgatgctgttcaatgcggattagtgtggatatatgtaattaaataatatcatgttacgtgcgaaaaaagcaaatgcaattgataagatagtgtggattcagagcctattgaatactctggtaagaatctctctcatcttataccagtttttcattcttaactgttcatttggtagatgtgctttatcatttgattggccacaaggtatttgtacgacaggggcgcccaaagtcttctcaaggtatctaatacttggaatggaacctccttctctcaccattaaaggttctgtgttccattctttgcctatttcctctcttataatttgataggcactattcgaaggatttcctaaccaaggttctgcttcatttaataccttgatagagagatgatttttggtcttcaatcttgaaaagcatgaatgcaagtagtcattcaatgactgtttgatgacattgagatcttgaccaggaaccaatcgaattgatatgtcaacagaggcagattgtggaatgactgtcggttcacatggtccactcaccttcatggtggtaactgatagtgatggtttggtccatttggcgattaaactatcgactgtgacagattcgtgtagctgagctctttccacaatttcgatcaattgtgccagttctttctcagacagaggctttatgttgtcgtcataatgtggaatcaaaattttcccaccatcatcttgtaatttagaaatgatgctgattaaatcggctgtaggttcacgatgaacaccaccatcaaacccagaatgtctatttggttcgtcactagtcacactgactgttaaattgaccatacctcttagcccataattcaaacagggaatgttgtcatctaaccaataagaattacttaaaatgacccaatcaatcttttctccgaatctatatctattgtctgcaagtgcttctttgaagcctgctgaaccattctcctcttgtccttcgatgataaaggtgatgtcatgatctagttcaccattttgcacaagttctgccaccgagtacatagcagctaataatggacccttgttatcagatacacctcttcccttcaaaaagccgttttcacaagtgagtttgaaaggatctgtgttccaataatccatatctgctgctaccacatcataatgtccgtaccatactattttcttccttttctctacatttctggagttaccagagaatgcagaatatacgatgggatttccttcattgtgaacaggaattaaatcacaatttcttgctcctagtttataaaatagctgctggaggtgagttgcacaacgacgaccttcaagtaagtgtcttgtatcagcttttctagaaacagtttgaaaatgaataagagtgctcaaattatgaagcatatggtcattatccaaattcgtagcagtccaagaattatgacggtccttggcagtagcttcatgactatggaatatcggatctatatcctcttggccattattgattaagtctgtgatattccaaaggatcaaggaaccgtcattaccacctgtgacgagccttgtatacggatttttggtacaacttttgcaaattatctcagagcttaaaatacttccttgatgcccttgccaatgataaacgtcatcctggaagaatttagtaacgccttttctttgagaggcgaaaatctgatcttgacaaactgccagtgaggtgatatcacttggatcatcgctctgtaaggtacttaccgattgattggtgttcaaatcccaaattttcaataaaccgtccgtgagtcctacgtagaggaaagggaattccaggaattgtgttaaaactggttcatcattatctaattcggtaaccaaacagattttgaccgattgatcatcggctggatctacatgcaatgaccataacttggaaacgccatctccaccaccagaaataatgtattgaacgtcaggtttcaagtccaggtatattggtagagtatctctgtgggactctaatttgacgatggaatatacaaatccattgtgcgcaaatggtaggatattggaagatggaacttgtaaggtctgacacgctgattcttcatcgtgtagtgacagggatgatattgtactgggtaaagtttcaaatgaatctgcaaggggttgtgttgattgttgctgaggtccctttgagtcaaaaaatttatcgaatcttagatgaggcaacatggtgtaatctttctttaagttgttttgcttgaaaacattggcaacatacaacaaggacgcattctgcgagccaaaaacaaccaagtctagttcatcaatatatgccaatgagaagatatcaccgatatccattaacgagtaaatagtaaccatctctttaacggctaaactgtagtcatgagtgttcccaccgactgaccaggctcgtactaatgaatcagctccaccactaaacaaatactcttcgtttttggactttgtcaaacacaaaacgctagatctcgtgttggttccatctaaagctcctagacggatggtatgaatcaaattgtaagtgcgtaaatcaatgcataaaattctagaatcctgagtaccagcaaacaaaagcttcttgcgtggaaatgtaacggtagacaatatacagaagtcatggctccatttatgtaactgcgatggagacatattcttctgattttcgaaatgtatcggtatggggggggggctttcttcagtacaaagatttctaataacagataagtgagtccctatgtttcagatgctctcagtacaacccaattctcaatttcaatggtatctgatgcagagaagtatacacgagatactaaatgccgataccctttatatatacacgggcatatactaccatcgtcaaagtttatgtgattcattggaaaaccttatgagatgagcgaaaatgccacaatttttctagtgtgagatatcacgtttttccatgaacaaacataaccagagaaacaatgaataggggtgaataaggagcaattgggactggagcattcagggcatcttttaattgtttgagtacatgctggtgttggcagtggatatttatcagaagaaaactgtatgatttaacgacttttttttttggatattacgtgctgtacttcaggacgatttctcaaattatgctaccttggccaccgacagaaggaggatgctcctcgtcagcgtaattgtatgatccggatcttcaatgcttgcaattaaaattgagctgtaaacccaatgactgtgttcttcataggttcaaatcttattcgcttcaagcatacaatagtttttatgtgaccattttaatgatactatcatgaggattataaaatttatataatttcattcaacttatacgtattttatcatactaatataggaatactgtttaatggtaaaactgtcaccttttaagtatcccactccagttattgtttgcagccagattcgaagctatttgacagtagaacggctttcacttgatagtatataatttttctttgtgaaattgaaactgacattaagcttacaatttgtaaaattgaattgaaatgtggaaaggaatctcaacaatatgagatatttaaaaggcataagatactatcctatcctgacaatccctggtgtactatcagacactcattgcatgctcgttagagcttatattaccgctagttctgttctttaaaaagtttcccacccgtacaccgcactaaattcgtttcttttagaccattttccatatcaaaaaattttcaaaggcagtataatccataaagctaaaatgaagctcatctcaccgcatcgcatcgcatcgcatcacttaataagagactgcgtatcactgcgtttagaattaagtttacaccttataataaacaggtgaaagaccaaccagaataacaatggaccataccataccaccaccagatgaagaggaattagttctttccaaattagtgttcggagacaatagtgacttttataatgaattgcagaatatcaatctggagctaagtagcgaagaagacgctactgagtacgtacagaatagtgactccgaagattcagagagcgacaatgaaattggaaaggttatggatgaccagctctttttcgttgatgatggtgaactaaatgtggatgatgaagatgcgatggacattgacgatgagaacgaacaagcaagtgggtctgactacagcaacgagtctgaggaaaatgaatctgatgcatgggttgattctgacgacgacagactacagataactgtaacagaaaataacagatcaaaaaagctaaggaagtcccacgtagaatctcaaattaatggacgagagtacttgcaaaggttgagatcacaatttgaaaagatatatccgaagccaaattggatagaagacgaggatgatagcgaacttgacaatgacagtgaaaatgaaagtggtgattatgacaacgttatagatggggacatcaatgctctaaccaagatcctagaacgtacctacaattatactacagcaaactcgaaacttctccccccacaaactctcgatataactaggctgaaggatgcaaatgcttcacatccatctcattcagccattcaatctttatccttccattccaccaaaccaatcctgttgactggtggctacgacagaacgttaagaatatatcatatcgatggtaaagctaatcatttgataacttcagtacatatcaagggcaccccagtccagacctgttctttctactcatcgcaagatggtaaggaacaaaaagtgtatacaggtggtagaagacgttatatgcatgcatgggatttatcaaataataacacctcagtagccaaaattgataagatttcaagattatatggccaccaggatacccaaagatcgtttgaaaagttcaaactagcccacttccaggacgccaacggagcccgccatggattgatttgcttacaaggtaataatggttgggttaatatcctccattcctccacaggtgtatggctacaaggctgtaagatcgagggtgccatctccgacttctgtattgattataaacctcaacagaacgggcacttccatactattcttattgctacaaatacatacggcgaagtgtgggaatttaatttgaatgaaaatggcaatacagtccgtaaatggaaggacgatggtggagttggaatcactaaaattcaagttggcggcggttcaacaatttcctcaccaaagaaacgcatcattccaaatagatggattgcaatcggttcagactctggcttcgtgaatgtatatgatagacaaagcgattcgcaaagaccggtgttcacattagaccaattgaccacatccatatcctcattagaattttcacctgatggtcaaatgttatgcatagcgagtagagctacaaaggacgccttgaggttagtacatctggcgacaggaactgttttctcaaattggccaactagcggtacgcccttaggtaaagttacaagcgtagcatttagtccgcaaggggaaatgcttgcagtaggaaatgaacagggcaaagtcagattgtggaggttaaatcactattgaaaaaacagaaccgaaatgcggagttcgccgcattagctatgaaaaccatagaatcatttttatgtatagacttcaacaatgaatatttaggaccacctgcatctataatatatatcaagcatattaataattctcttcttatgcctggctcttgcaagtccgcactaatcactaaacttacccggttcttgttttgtatggtaaaattttttcttagctttcagttctctctgttaacatgaaatcagaaagcgtcaaaattgtttgagttcaaagttcaatgaaggacacgacacacaggaaaggcaccttgacatcatctacaaactcatttataagtcaaaactttgaaattatcagactaataaactagcaatgaaacctacctccgctagattttttcaacaatctcaaataacacaactaacgagaccttggaagaaataccgtgatggtacgttattctatggtgcttctaaagtaggtaacaagcgtgtaccattgacgacgaaggatggtaacaagtctatgtacaagggtaccagatcttcaggtattggtagacatacacaatatggtggttataaaattaactggaacagggtgcgtacatataccgttccaaaggatttcaatacggatttgaaaccactattatctcataacttgccagaactaaaacatcaattctcagggtatcagaaaggttacacggatccaaagctttacttcgacaagttaaagaagtatgtgaaggaagggaaaatccaaagcgaagcaagcaatgtggaaagctatgttgaaagaggatgaaatataaatattaaataaaaacgggttccggagtttcaaaaattcacccattaatcatgtacataggatgttaaaaagtatagattccagaattgtcttctaacttaaaatatacatacgtatttatgtatgaataactgtaaaataaaatcattcgctactttatgatcagtattctacttccaacaacacagtcaatttcgcggctgccttaggaagaaatattgaggtaaacaataaaacatgtcggtactatgaattttcgatgaactgtacatttacatttatatattagtgattgtacacgagatttatatagtaaagtctgtttacagtttaagcagctctacctcctagcatttgagcgatagaactttgaccgcctgtttgttggaagtctacggtaacgacttctagaatggcaaatgcactgcaaactgcaacaacaataccggcacctttacccttcaagcctaatagttcaccaactgcgaccaagaccgccaaagtggctgcaccagtggcagacgctaccggaatgattctgataagttccttagaagcatctctgtgaccagccaatgcaacatcttgttccttgaattgcttggaaacatcacgagatgatgagccagagatttcttgccagtttgtggcgaaccacacaccagtgacaatcaagaaagccgagaatgtgaccacagtcaatggttgcttgaaaacagcaaagaacgaagttggtggggttaacaaggacaatggaaatcttgctaaataaaagaattcagtggactcataaccacccaaaactttgttgataatggaaccctcttggttaccaccaatcaactgaatgatgacgaagccaagtatatgaatgtagaacaaaatggagtaagaaaatagcaaagataggccaccagtgtacaataatctgatagggtaaacgttggacattcctcttgccttggtggatctgatagacaactctgttctgatgttttgtagataacagacggtaccaccaagaacgattactaacaaaccagaagtcaagtttggtagataatctctttggaaagcattgacaagtgcgcccaagaaagtcttatgcttagcacggaaaccttgtaacaagttgatgacagcaccccttggttctctatggccttcttgacccactggaatttgttgaacaccgaataaatcgtcaactaaaccagtagacagagaaatggcgataatagccatggcaccagaggcaaacccatgccccttgtcaataacttcgatcaacaaggtcacaaagaaaccggcgccgatcaattgactgttaatcaaaaatttagccattagagataaatcttcgccatagtaacctgatgcaatgaaaatgttagctaagatggcataactgccaatggaaacaattttgatcaacgtttggaacaattctctatcagttctttggttgaagttgactttgatcaatttgaaacctgccaacaattgcaagatcaatgcagttgcaattggtgggaaaataccaaactctaaaagagtgcgtggttcggcagcgaaaacaccacgcaagaagaagatagggtccttcacatcaacagattccttagtaatgcctgccagtgggaattggccaaataagtaaatcaatgcagtagtcaaagtaatgacaagcttatcatcaaatggtaaattgtcatatggaagttcaatttcgggaacaaaagccaagaatggctttgccaaatcaatcaaacggactgtaacaaaaaaataaatattaatttattttagaaatgttgttagtaactgttatagcatacgagaatagttccttgactaaaatgtaccttgcagtaccttcaaccgataatttcaggtaccgaaaaagagaatgaacctaaaggcaagttaatgggaaatattccagagtttaaccacatgtaacatacaacctgccatttggtggatagctgaaaataaaatgaaagattagagcccttggtagtctttcaatcagctataaatctgggtcccgaaagtgtacatttgttgaacttacagatatttgttcaattgcaatcgtttttaatctttccatgatatcgcctttcgaacaaacaatttttttcatactggtgctgccttttcaaggtactcagtcgtttgttacgaaactcacgtgatcaccctaatatcacgtgagttataggaggaaaggtatccagtggttatacagcaaatacgaaacgttgaacgaataacaactggttagcctagtaatgctgtaagtttttggttcaattgaactagtgaataggccataggatgtcctatataatccctgcttcctttcctgcctttttccctctgcaggaaatccaaataatctcttatatattattcacaccaaatagtcaatatcactttcaaacagttgaaattggtaagtattcattcaaagagacccatttgaaaatctcccaggctaatcagatcgaattataagcgatgtctaagcttttgaaattgactgggtttactacactaagcactttgctaggtgtttcctattactattacgtgattgacaggccactataccaacaaactgcgcttcataagaccaacgttcaggttgagaacatcattgacaacaaagcgcaattccaatatgagcatatgagccgggattcccaagctgttgtacaaaggccatttgctgaaactgttaaggacatttggaacaaagaagtacgcaatactgctgactggctatactcttggggaaaatgaggtatatctgtctggctccctacattcagagatgttgctctgatacaacattcattaaatactattaaataagatattcacgaacttaaaaataaagaaactttacgttattaggaactgtctctttgatttagaggcaccatcgatgttgttatttctgcttgtccgttagcatttgatcggagcttcaattcaaagtacaagaacttatgaaaaaaaaaacccgtttatatacacacataccagtgatgagatgagaagatggttgatccagggttgcaaataaattgacagtgttcttctctccgcaatatgactacccctgattcaaatattaactataaagatgctatagactactggacaagcattccagctactgtggatggtgtgctaggaggatacggtgaccagactccgttacctaacatggatgtgcatggttcaatgcatttcgttaggaaactaaaatcaagaatgattaccgagggtcctaaaaacagttgtgatatcggtgcagggatcggaagagttaccaagaactttttgagtaaaattagcgataaagtggatttggtagaacctgtagtgccatttgtggaacaagcacatgtggaattggatgcgttaaagaaagagggcaagattggtgagatatttgctattggtatgcaagactggaaccctgaagaagggaagtactggttgatatggtgtcaatggtgtgtcggccatctaccagacgaagaattgattcaattctttcaccgatgcaagaaaggtttgcagaaaaatggtaccatcgttgtgaaagagaacaatacagttggagatgatgatttcgatccagtagacagcagtgtcactagatccaatgagaagtttatgcagttgtttaaagaggccgggttgaaagtcattgcaacggaaagacaaagaggtttacctgacggcctctatcctgtacagatgtatgcattgaaaaccgtagtttgagacaactatttcaataaataggacatcagtaagagcatgtagtattctacataacaagttgctatactaattaaaaaagaagacgttcaagagacagagatttcagataggagcgaaagactaaattcgatgaatttttatcttcatataggaagttatccttatcagttgaactatgcactgaaggaaatgtatcatcattaagatatactctgtaacccaagacaaatggagagaaagttagacaagatttaacatgtcttgtcctgacactacgttgcaccatgctcctgcataaatcaaacaatggttatccatttttgaatacaacttggcacaggacaagcctcaaagagttgaataattcttccagctgacagtcgctgtatcgacctggctgacaaccttattagaaagagagagagaacgattatcctcttccaaaaagtagcgatgagatacgtatcttttcattttcgaaacattttttttttaagcttttcagaaacagcagaagaacagtaaattcaaactggttaaatagtaataagctggattacagtggtgttttagggcataatttaagaacgtcagtgaatgcaggctttttatggcatgagatgcgacaggtcgaagcactcccgtaatcctcgaccttaattgcaactgaaggagtggtctgtattatttgtcactggtaatcacgtgctaccatcactaaccacgaaagctggctttgtaaatggagaatgtctgtttggaacatgaagaccgatatcaaaactataaacacatacgtgaatcaaagtgatccattattgtttatgaagcaagaaagggatctctttgattgagatacatatcattcggtcaattatatagcaggtttcagtatcagcactcaattgccatattaggtttctgattttattttttttcggttcatcggaaaacgcaggagcgctaaatataaaccgtcgtttgttctttttattgattaatctaatttattttaattcagaggtgataggaactgcattgcttcatttattcaaatatgagtgttgacacttctgagtcagggacagatccaaaccttactggatgtgtagcggagccttctcaatcaaatgatttgcttcaaagagaagaagttaagaaagttttgtcttcagatatcgccatcaatgccctactatccaggttgaaaggttcccttttgacatgtgaggagttcaccaaattcatgagaaaaaagtacttgtatgaggaagagcatgcacaggaaatgtccaaaaccaccaagcatttcttccaagaaactgggaattctgggttatctcgatccatccatcaactcttggagtacgataacaaactatcgcaagttaagatatcgtacgttagggcattgcaaaaaatctatgatgaagtaacagcgttactgttaactgtaacgaagaccagaaaatccttaaaggagaaaagtaggagacttgaaaaggatgtttctgatgcgatccacactgccgaaaaagctaaatcaaggtacatctctttgtgtcaagattgggagaaattgagattaactgatcccactaaaacaaaattaacgttaaggggatcgaaaacaacgaaggaacaagaagaagatcttcagcgtaagatagatagcgccgatctggagtataaacagagagtagatcattccaattctttgagaaatacttttttgagtaaagaacgtccacagatcgtgtctgagttgaaagatttgatcttagaaatcgatacagcaatgtcaattcagttgcaaaaatacacaatttggacagaaaacatgattctaaacagcggggtttctgtaaacccagtagatggtaactcaaaatctatgagaagttctgcaacctcgatgaataacgaattggatctttacaacttcctaaacaaatacaacacatccaaatcgggatccatgataaataagaatttgattcctgttgaatacaaaaagcatccatcaatggcaaggtcatacacatctagcgcaatgggaacaagcagtaactttgggaaaatatctggcccctcgaattttgtcgtaaataactcaaaaaactcattgccaaaaagagtcatgtccactcaacatgagtccccattcaatagttcttcagcagctgccgctttgtcatccacagtatcaccttcagctaccacacacccgccaaattctgcttccagtggaccgtctcagagctctgtgaatggaaatagcataacatcaacatcttcaagaccattgaaatcaatggtcgatgttgtgccaccctcagaaacaaacaagaaagacttcccaactcttgacccacgcccaaatattcgccaaaccagtgttgcaccatccgttgccaccaccgaaactatgacaaggccaccatcaacagtacaaactattgggtcattaccgcctggtactgcaaaagatttcaagacatttgcagttcccctagagaatcttctggattacgatcaagatcttgtaccggctattgtccgccaatgtatctacgttattgacaaatacggtctaaacttggagggcatttatcgtaaatctgcaaacgttcttgatgtgtcacgactcaaaagtgaaattgataaggacccatccaacgtctttatgatcttaccaccgaagaactacactgactctgatatttatctggtaggttctttgttaaaaacattttttgctaatctccctgatactcttttaccaagagaaatgaccgaagaaattaaaacgtgtctatcgattgaagattcaactaccagaaaaaactatatgcacggtatcatctataaactacctgatggtcaatattggacgataagagcattgatattccatttgaaacgtattttggaacacgaaactaaaaacagaatgggtttaaaggcattgtgcattatttggggaccaaccataatttcacctaataatgaagatttgaatgatgtgaactaccaaataagtgcgatggagctcttgttcgatgtggcggatcaagcatttgaacctgagtaaatgtactaataaaaagaaatcatttaaatatcaaaactaaggtaaattctataataagtattgtacgttaccattttccgatgtatagtattcgccgcatctcccaagcgcgtctttgaattctccgcggctgatacccgggaaagcagaagcgacatattcaaaaagttttgtctttgtacactttcttctttgtttcaacgtcctgataatgcatgcacagacaatttcagtgaaccatctattatctgccttatcgttttccataatttttggcgatattttaggaagatggtacagtgtcaatttaccatcattaagagcttcctttttgggtttgtatttagtattcagataaaaacagtcctcagaatcctttttaaacatgttcatttgtaaaaacatttccatattgctgtcaatctgaggtatattgtgctttgtttctgtcaaagtgttttttatttgttcaagtgaaagacgagcactgttattaaataagtgaaatattgatgcttgaagtaggttaacgtgaagtatcactatttcagaagaaattccatgtctaaaggggcttttcaattccagaagatttagctgacactggagtgacattgttttgtgatcattcctatctaaaaccttgtagtactcccattgtttattcaccataccatttaatggttccggtagtatgagtcctgaaatttcggatgaatccaacgagtccgagatgttagattgtttaagaatgacaggagttatctttggagctctcttcattctcaatgattcaattagttcgtcgtttagctgctggagttcaagaatgtgaactgacttcaacagcccacagcaaagtagctgttggtcgaatctctcgtttgttttaatcagctgctcggaaccccccaatgactttagtaccgaccgtagaaaatattttctcttatatatgttccatagtaactcgtcttgttttgagtctggcggaaagatgtcgttcataaaaatgcagcatgatctaaccagatctttaatcccagaaaattgcccttcctcagaaaccttacacaaccatctgtcaactttttcaatattctttatgtctgcattaaaagtcaatgtaatcatattcttcattattgcctttcgattagaatcaaaagattcgcttgacatggaataggtggagatgaaggacgacaaatagtcttcgtcaagcattttacatataactcgtactacgaagttatcatattcctcacctcgccacgggtaataggcatatatcatatcccctagctcttctattattgttattatcgtcatttgatcatccatacatctatcgaagaaatcctcgaagtatttaaacttcaataaaagaatatccacagtattgatgcttaaattttgacataatatttgatattcggaacagtagtatatgatttgtttttgaagactgtcgactcttttgaagtggtcagaactataagtaaaggagttaattatgcgattagtggtttcttcaaaaagccccaacactgacgatttatcaattggaatatcgtacctgataatgttcttgaccaaactgaactgggatgttgtacgtgattctaacgcttcgactataaacgattcgatagtttgtcgtagttgcgagtgcaatcgatttgctattcttgagaaaaagactaacgttgcgtagccttctaatgatcggcaggagatattttccaaactatttggaaggttccggagaaaagccttggtgtaatattgcaaagagttcaccttgccctgtatctttttgtaagcatcttctaactcacataagtttgttaaccattctatattcgtgaaatcttcctcgtccacctgttcatttatcaatttgctaagaagtgaccagagatcttcaacaaacgtgtccttaaagacagcagcatattgacttgaattactggaagccttagcaagcctcggtactttacatctaatcaatttttgcaaagtgaaatatatcttttcatcgtgtttaaggtcatctcctgggatttgatattgtctaagcagcagttcgagctcagataacagagaatcgtacagaacttttgagcttttgattcgttcgggaaccaataacggcatgtcacattgactgtacgttgagggtggaacctttatgcgatacatactgtcccataacaattgaaatactaagtgttatatgatcctacgtacttgcccaatactatatcaaaaagacatacgagtcacgtgccaggtaaaggaagtacattgtgttggctacgtaactagcagccaatgacgtaacagtagaagttttggtatactgagctcatggtattgtgaaaatattattcaccagaagtttactgttaggtttgaatccaagattaagtgcaaatatgccatcttctttcctgatcaagagtccgtgcttgactaaggatgataaataatggctgaacattgcttggttgcgaacggaaagagcactaatcatttcatctagcgaccagcttagttttttattgaacaatgtatcaagaatgacagcatgacataaattgaagtttatggatatgttggttttttgaaaaattgtaggtttcatgatgactctatgtagatgcggttgatcataaaagtgtacattaataccatcacttgtaatccgtggttcgtgtttgttaacccattttcctggcagattaaaaggaagttttgccgaattttctgagtaaatattaggaaatatttttgctggtaagatgatatcgttcttcctattgtttctcgttatctttaatgacaaatgactgaacatcctgttaatattatttagtgtcccagcatcctgctgcattactatgtaaaagcgagcgaggggagcgtcaagttctagtttcttgccaactaaaatagatttgactagatctatggttagattatctcgaatgatttcttttataacgtattgctcaaaatacgaagcagaaaatggttgaaattgtcgagtgttcttcaagaatactcctattttcgttagccatcttctttctttttcagtcatgttgtatgcttttttacccaacacatctccaatgttggtagtgcctggaaaataagtaagaatgtgtttcaccatcagtctcatgaatttaatagtatttttagagtccaattcaaatgcgtattggcggctcattataggcttgcgctgttgaagaatgaaatccatcattcggatcaagaggcggtggtaattaggcccaacctcagtcaaatcttgtacccacttcgtagtaatttcgaggttagcagatagtatatccttttcggtcaaaacactttgtaaaccacatatattatagctgatacgctgagaattgagcggttgtgatgaaccgagtttctgtgagatcgaagctttgtagaaatcaacgtcagcaaatacagcaaaaaaaccggcacgagtcactgcaaaaacttcttcgggatatatttggagagtcacgttgtgcaaataattcatgaaggtataagcttccgcttcaaagtccttaatatctgactgtacttgcaattgggttttgaaggttaataccaagccctcgagaatagataagataaatcgtggattaacatcgttgttcttaggtagggatatcggatccaaaaaatgatgataatgtgaatcaaatcctaagtctgaaaataacttgcaaacctcataaaactggtcattcgatatggatcttgtctcaacctcaatttcaaaccctcttctaattagatcgttcaactcagaatataatttatatccaacaatggtgaccagccattgtacgagaagtgagtaatgtcgtatatttaacccgagtttgtgtagtgctcgctctaaaggtaagaaaagaggctgtattttccttagttgaagttttattgttaggatgtgttttgccaagctcccaatagtcaatggactttcaatagtgttagtcatatgctgcatttcattgtcaaagctttgtaagaaacctcttgtgacatcgagtaaacggttcttattgtcgtccaatccattagcatccgagtaccttagttggtcaatccatcgtgtaagtcgtttattcacatcttttaactcatcctctgatttattcactaaattaccgtaggtgaaccatgttagctcttttccgtttcgaatattcatgggaagttaatagttcatatctttcaggtgtcatacacagggctcaacgtataacaagaagctctattgctcctgccacttctttgttgaagtgcatcttgaatggaggtttgactattgaactatcttgtcttggccaaaaaactggaaattttggcgattttgcagaccttttctttgcaattcagtgtaagaaattgctaccttggtctggtattgatggtttcacaatcacctaagggtagtacacggcatgaatagtaatggtaacgatttgaaagaagagtctttagatcctgccaaatatttggcggaaacttttaagaaggagggtcatttagacagtttaaagaatgaaatactatctcaaaatgtagagggtgatattagcttggacgaattcataaagagccgagtaagggatttagttcgtgatagggtaaatgaagatgagtctttaattttcaagaacagaggtaccacgactgctcttcttgagggccaattatttaaagacggattcaagagtttaaacacgtcaaatatcgatgtggagaagcttctgagtgattcacttgacgatgcgacgacgagacaaaagataagaactatccttgaagccaaaactaatgatagttgattgaacagataaagtagcaaggctgctacatatatattttacttcgttaactaatgtaatataataggtcatcgcaacggcgactcttaaattttctaccggctctatcaacacttctatatttaaatctatcaccaagaattgtataggctaaagattcttcttcattgattggaatctcgaaatcgaaagttgttcctttcttcggtatgcttttcaattcatcgactaatccgcctttcgttatgattatgaatgtcttttgagcatcccatattacaataccatttttcccagttaatgacttgtttttggatttagataccttcaacttacacccgttataatcagccatagagagcttgatcaaagtttgctgagagttcaaaggtaatggatttccaactttgtgattatctgggatgttcaacaattctttcatgtatggacaccatatatcttcgaacatggaggagaaagtttcaaaattcggcagttgctccaataaatctttgtgtttctcttcaaggaccctttgtagctggtctctatctgaaatttttagtctcttggctaactttttgcaacttgcggatgcattattgcatttgtttatatattccttcaacaaaactcttgaattcttgttcactgccttgtaatttggatgttttaacccagcagatccacccatactacttgaatgaagaagttttgccttactcttctttctaagcttggtagacagacctccatcagttggcatcaagaacaacgtctgtgttaatctattctcattgataggtttccttggattatcaaaacatttagtgaataagcactcttctataaaaggttgaatacgatccattttggaagcccgtatatccgttcgcgaagtaacagctttaaaacgcaacacttaccgaatactggttgtacccagctttaaaaccggtaagattgttgtcccttcggcagaatgtttctttcaagtttatctcatctcaatttttcaagttttacccgatgagcttccgatatttgatttacttccatgcacaacgttgtgaagatgaagatataaatttcgttgggctgaacaatttgtgaggacctctatgggtgagaagcatccatgatcagtaaatgtacgcatcgagtagcgacaacgctattgagaagtggtatatccgttccaaaacgactatatactccagcaaataatcagattccatttgaactggatgaaacagatgaaaaatacaaagagctcaacaacatctatcgtgagctcttcactccaacagataaagctaacattcttactacaaaagatattgaatcaaacaagcgttctgaagttgatgaaataaatgaagagctaaattccttgtattctgtcggtgtactttcaccagcggagctggaagacgcggtaaaaagtaatggaaggttcgtcatcagaagtgtatctaccaacccatacttcaacctagctttagaggactatgtgtttcgtaatacgcctttaactgagaacaaaacgggaaatgaaagaatactgctttataccaatgataaatgtgtcgttgtcggtaagaatcaaaacccatggaaggaaacgtacatgagaaatatcgcatcaagagggtacaattttgtaagaagacgttcaggtggaggtgcagtagtgcatgatttaggaaatgttaactattcgtatttgacgtcgagagaaagtttccgcagagagttcttcaatcagcaacttgtacaatggttaagtaatgagaacattacgttgaacgatagaggcgatttgatctataaaggttataagataagtggtagtgctttcaaaatagctaaaggaaaagcttatcaccacggcacaatgctaatagattcagacctggctcaattcaaaggtttactaaaaccggatgtaattcctggggttgaatggacatgtaatagtgtcgaaagtgttagatctaaggttgataacattggcggaaaagcaatatcgtcaattgatgacttttgcaatttgattacggatcagttcagaaatctggttgatgactctgaaattcctatgttttattgtgatgaatcaagttctttactcgagatcacagagatctccgaaaacttacggagcaaagaatggaaatttatgtcaggcccaaggtttgaggtaatttgtaatgacgttacaataaaggtcgagaagggtgtaattattgaatctgactggcctgaattagttgggatgccattttacaaattttatgacgaagtaagggaagatgacaaaatattcaaacatttactgtaaataattatttatactatattaatgtgataaagcagggataaattcacacgcaggataaacaattagtttatttgtttgcattttgttacctctggatgttgaggtagagcaaatgcaaaatcttccacgtagagaatgcctttacgatctaggatgtataatgtgtgaccatcaacactgaatctcattgatgcggcttctctcattctgtaagcattagaaacaacatctaccgttaatattcttctcttctcgttatccatcattgtcggggcaaatagtatatttacggtaccgttcctgtctaagaaagcaatagaatcgtttcttggcgagatctcacatttatgaatcttagatcccaattcatccaatcgaaggagcatggttggttgcgcgacactttgaacaccatttatggattcgatttttgtgtttattacaattggaggggcgttgaatgctactgaggtgacgcacattagattgggattacctggaaatagtttagtatcagtgataccttcagattctaaagaagtgtctagggagcgtaaagatttcatgacaagtctaggttcgttgattttcctcaatgatatcaccaaaaatcttgactctaatgcagttgaacatgataaatacttcccatctgaagaaaattgtaaggtatgaattggatcgcgatatggcaatgtgatagttatcggttgaggaaactgccaactctgcgatgattgatcaaactcaaatctgtggaatagtaataatgcctgttcggaaccggttgttctgtctctgcctgttattccacacgaaactatggaagttatggggtttatgtcaatcgaacggattgggaacgatgagcagtatgtatatattggttccccacctctactcaagttgaaaacacggaatatacctcgtgtaccagccacaactaataatctattactcagtttgcagtatatgtgttcccattgtgaaagtgctgtcgctgcactgttatcttttgttttctttcttgttgtcctcatcgtggcagcgtcccaagactcgttgtaaatgggctgtaaaacagtcgcattctgtgggaacgatagtgattcaaaattaggaccaaactccccgttagtgttgccgcaaaataacaattcaggttccttgttcttcgagccagaatttgtggatggtatagagaacacctcccacttgtttggcgttatcagagcaaacttagtacagtctggcgagatagaattattgatgaataatttcgatttcgttcgtagaaatttagaatgtgtgttgaactgcgatcgttttctatacattggaaaacactttgcaaaataatactctttctcttcgttgaattcagaggcaatcgtagcagtattaatagggaataaaggtgtctcaaccatagatgaattgttgtcttgaattggtatcgtttttgagttcgagatgttatccaaggatcctgtttcgactgctattggctcctccgcggaggctttaaaattctgcacatcattaacatctttcaacgcaccgttcttcacaggtgaatcttgctcatcctctgtcgccactttacttgccacttgaagaaacaacgataaaagcgaatgcgatttatctgaatgacgtcgactcctttcagtcgactgtgtcaaagtgggatcttccagtatatcttcatttggaggtttattattttggtaaaatcgcaattggtcataaagatgtctcagtgggccaaccggtccaacaccagtaacagaagctgtatggcaaactggacaagtcgcagacaatgaagtctgaatttctttcgacaattgctcagacataatacagccacatgactgaacataagcatcgtcaatgtatcgatatttgactgaaatcttattcccagatcgcagtatctcactaggtaggaagagattttgttccaaatcctttaatatctgttcaatggacatttgtcaaaaacagatgtgtaaacttttacaataaatgaccagcactattttaataaggttgcctaaccagcccaacaactgcaaaagctgttttgttcttatgagaccaatgtaaaatggacccttgataatgaagcaaaaaatttgcaccaagtgatagaatagacctgtagtcacctcttttaactgtagattggctcttccaaagtaaaagaaacacgctcttccaaagttaacaacctgttcacttcgactgggttgatcttttttctcttctcttatctctatccatccattgtgcagctatatgatatcaatcttcactgcgtaaccgttggttcgacctttaaaaactgaaatgtttcgtttcgatttttttttcaagttctgtccaaaataagacttctgttcgaaccctggcttaccagcttttcttcattttcgtttttcctttagtaacgtttctaaagttccaggaatgcgagataactttccatacagaaaagtttcagaacgacagattcaacagatacagaagaaacttatgtgcgtttgaaaagatggggtgggaatgatgatctcattatcggtagcgtaccataagtatacagaattattataaaagcagaggtaattgtatgagtgatgaagcttattcctttcgtcttaatttcactttaaagattgatgaacattcgaaatacatcggtgataattcgaataattaataactaatagatcaactgccgtcgttaaccgcatttactttattagtatttttgagatgcaatttccccttctgatgcagatcggtttagtttgcttacaaattttcaattgcgtcgaatcgtttcccgtatcttctcaaacacactcacttagttttgacaccataagaagagtatttaatggaattgattcccttctgagtgaaattgggaaaaacgtaacaattttggaaaaccaattagccaagagtatcacctttgattcaactactttacccgagaaggagataagtagcgaaaccaatttcaatgagttgcaagaagctctttgcgaattccaagttgttcttgacaattgtatacgttttctcccgcacgaatatcagagggtgaacaatagtaaggcacatatttctcgtgtggtggccggtttagaatctatggatgctatttattacaggacgcataagatggttgccaactacatcgcgtttcaaactacgagacttgatgaattgagcaaagttatgtggaaatgctccgttgaaaattctaacacgaaaaatggttgcaataacatggctttgaaacaggtacaattgcttgaaaacgttgaattgactatgaagttaactaactcgtaccttgatattattaaggactccaaatttttgactgaaatcaagagtcaacaacctcaaaacgataattttcatgatcctaccgacattataagattactcgaagaagagtcgttggaagatttatcttgtgtgactttaatatttaaattgttattacttttcggcgctactagttttgcaacgcccttgatttgtttctggactgggtacttgaaaaatggaagcagaatatgtgagaaatgggcagtaaatatcacattcaaggagttttacatcatcatggaactagtaagaagaataaaggcatgagtagttccaggaattacttcatataatggatccttccaatcacctgtccgaaattttttctatttttacttacataggcgtaattgttattaacgtaaggaaaacattctttccaatcccgaccgttattaatgcatttacgttcgaaggctttttgctccttctagaaaaaagtttaaaaccttaatacttgaaagaggaacacacaaaaaaaaacaatggccaaacacctgcgcttagtatggaaaagatgggcttgttactcgtgccgctagtccacaattttgtgagacttcaatcatcagtaacctgtacttttaaccggttgcctaaaagctcacagaagacaaaatgaaatattatgtaatgcactatgttcccaaaaaggtatatcttttcgtacttgtgaaaacttagcattcagtaagctcgaatatttccaagataaaaacaaaaaatcgatcacaaaagaattttagaatcacaagttatcagtccattcacactatatatatagttatccccccatgaggtaagtggcccggcaattgtattatctttttttttttttcgtttattccgattcgaatgctagcagggtccaaatcgcactcacacaatatgtaaaccgaaccagagagacttgcatatctacttatatagatgcatacataatcatacccctctcctatacccctctctctttcttacatcattaacacgcatagtcttgtcaaatcaactttatctcgaatttcacaaggtttgcctgcgttgctgtggattttccttggctttcattcctgtgtgtccgtttctggtcgtggttcctcttttgatagataaaaaacaggcgaaaatcagtgggagtcggaaaaatataaagctgtatactggccgacgcacccaattgaacaaatacagtattatttttctgctgtaagaagagctgaaactacataaaatacctgggttcgtgagtattatcccaaaacttggccgttgacagctcgagaatttttaggaagttcctcggttcaactttatcttagcggtagctttcttttttttttcgcttttgatttttttggacttttctgactgttaaaagaaaatccaataacgatattcttagttttagggaaacagatcaccgcaaacagcagaagacagagtattcaaatccaacaaaacctaataataactagctgttatagcgtgatccgatattctggtcgaaggcagtgagagtaaccgttctggtgaatttttttgcttctgcttttacagttttcaacctttttcaatctcattttttcactcttcatcatcaggtagaatactaagagacaaagcttctactgttattagcaaaggttgagagaaaacagcgtgagctagtgaagtatttgatacttttagttggttcgattatactattatgaggtgtgttttggcttgtagtaggtgtaggcaacagaagataagatgcattcatgatggtaagcctccatgtacgtattgtctgcataaaggatgcggtgatgagtgtgttttgacctatcctccactgaagactaataagagtaaggtcaacaagaggaaggctaacaaacccctgggtaataacagaaatggtgatatgtcaggagttgccgttgcagctgcggagacacctgtctctgcagcagtagcaccaccaccaccaccaccaccaacagtgacaacgaataatttaatcccaaatggagagctgccgcataatcagcaagggtactctcaggaacgccgtcctgatgctgttttaactaatcgaaatttgaacgttgtccctcctcctccgatggatgctattttttcaccgggtgtgataccgactatcaataacgaaatgttacagtaccagtctctcaagaacaacgtgcgcgctccactattctcatctattcaaagtctggtaagttctactccaaagagccatattcttacagctattaaaagagtagagattagtttccctgagtgtcttttcttccatataccaacctatgaaaataggttagaagaagtaaaccatattcttatcggtgcgctgttggctgtttgctcttattccagtccattcaaagtccctgatttgaaatcagagttcagttcggaggataaatggttaggagtcaattcgtttcaagtgaaacactcgctttatgagaagctggctttggatgcaatatttaacaactgccactttatcagtaagcctgatatcgaaatatgtcaatcgcttctcttactatcttgtgtcaaatggggtcataatgattattttgcagcctggatgctgcatggttgtgctgtgaggatgatacaggcaattcagtttgacgaaaggtttcaacacagttgtaaacaagacccgttgttgaacgagctacggaatagaactttttggtccgcattttgcttggatagagttatttctactggtgaaggtcattgttttacagtcaatcgattcatggacgttgaattaccacttcctgaatcatatttctttgggctttccggtgttagcaataccggtaaaacaaatgttccattaaacggtgatgtatatggtttatccaaaataaactcccagtcgtcggatattggaatagaacaagaagtcagtgcttctaatacccaattggctgctgctttcaatatccagttgaaaagtaaagtcaccattggttcttttaacaagttttacaaagcttacccccaattgttactccaaaacgaaagatccgccttcattaagtgctattcgttatggggctccataaatgagtacatgatggacggtggtagagtaaaaaggtcggctgaggttccatgggatttagaaaactctactgttgggaaaataacaaaagaggtggatgatttctggaatgtgatacctgcggaatggaaatgggggaattttgattatgccagtcaacgcccatatcatatcaaaaagcttttcatgataacttcaatgaattgcttgcattttttgactataatattttgcattagggaatatcttccatttttaccttcaaaagaattaggtccctgcggaccaatcgaaccaccttttatgccacaaccaccatacacaacctattggtcagatatgtcgagaaagtgttttgcagcactacgacaactttgtgaaattttaaaggtagttttcgaaacggaatctgaaaacactaaaggatctattaatctcatcgaatcatcacctttcttctcattttgcgcttttgtttgtgctatccagtgcaattacggttcaaatttccctttcatggaccctgacgcagctttatataagaagaataaagacaaaaatctatcatattgctataaaatggtattaaagattctcaagtcaagggagagtttttgcccagtcactaagaactggttgcatatggttttcaaagttcaggagatgtataaatctgttgctggtagcaggactagcagcaaggtagtcccgaacggctcagaacaaacccagacttatgttcctatccagccgacaattttgaatcctaattcatctcaaaatacgttccagcgtcctgcggacccccctggtatatcacaaagcaccgcacaaagaattcagaaccaatctcttccaaactatggtgccccactgccgttgggtcagttgatgtcaccatcagattcaatggcaagcaatcgagatcaactaccctcgggctcgagctcactcattccagatagcagttcctcgattatagtgggcactggctcagatgggatttttggctctaatattggaaatagcgaaaacaacggattacttacgaacagtaaaaccacaccagtacttcaacatgctacgacgacctcggacattgcttcaggatcttcatccaatccaagtagcacccctagattccctatagaagtggaacctgagacggataaattatcgctcttattttcggatcaagaatttgagatgttgatgcaattttccaaataggtaaggtgaaaaattcctaagccttaaattgtaacactatttcattgaatattataaacaaaaagttttggcatattaaacctcaagttaacactggcaaagtttctcaccaaagactacataaattgctatgaaaaatgcaaaacaaaaaaaacacaaaacaagaaaggactacgaagttctaacaaagaagtggacaaggaagtaggttttgcatccgtcttcatatactaatctgttatttttgtcagagtgataatcgtgtatgtatatgataacattattccccaacggacgcacaattgtttttttctaattcttttcataaaactacgtagatcaacggttaacggaagtaaacgtttgtaatactattcagagattctcacgattccagaggacaggtgcgctcagcaatgctttaatatgtgctgtcgtcgtttttatatccattagtcttttattatggtggtgacagtattaattagccttgtgatacatcatcgtaaacgtttcacgtgatcttgtttctttttgacaatttttcaagtcttcaattttagcgatgagatgagatgagatgaaataggttgaggaagaatacaatccgggcaaagctcgagtgttgtctcatcttcatcttccagtggcaacttcccatcactactatcacaaacgcagagtctataaatgaaaagatcatccgaagaagtgaaggctctacgcctgatcaagagatttaaaaagacaagtaagaatccaattgatgaggaagatggatgttctaaatgtatagtaagggttccggtgttcatgtacgtttctctggcaccaatttatcagcaactacctaaggaaggtattatgagacaacatcttaacggaatggttatgaaatacaatgccgatgttggaggagttatcctgggatatgaaaacctatcgattcttggtgaagaacctactgaggaagatgagaaactgatgaagttaacagcggatactccatttgctttcacttggtgtaacgttgaagttatcgtgtggcaacctcaggttggtgataccattgaaggttggattttcatccaatctgcgtcccacattggtcttttgatccacgatgctttcaacgcaagcattaaaaaaaacaacattcctaatgattggacgttcattcataacgaagagaccactgaaaacggacaagactctacagatgatagaaaattccaatcccttggtcattgggtcgatggtaatggccaacaactcggtggtaaactaaaattcaaagtaaaaaatgtttacactactggcagaatggtttcattggaaggtaccctacttgacgattctgctagaggttcccattcagaagcggaaaacttacctgtagtttcaaacaagaaaattgttttcgatgatgaagtttctaaagagaatacagattcacacaaagaactggaattgtcggtggtcaaggaagataatggagatgaaattatttatgaaaaagactccagtgatagcgacagtagtgagagtgattaaagtgagactagtttatatgaaattatttctagagccatatgtgtattaaataatactaactatttctattccatctttaattcagttactggttgtataatattttgtcagtttgtatgcactttctaattattcaagtgttcgcgaaaataaaaacagaacataaaagatcaacaaacgcaggaaaacagaacagagcagaatagctccaagtgacctggactctacagccacttagtgaggtcactttaaaaatatccaatgactacaccaactatgcagagtacgtccttgttgacggaacatttgggttatccaccaatttctttagttgacgacattatcaatgccgtcaatgagattatgtacaagtgcactaatgcgatggagaagtatttaatgcaaaggaatatcattgggaagaaagatttctctgacgaaattaaaataggtaccgccaaactagaatctttgttggaaaactctgtggataagaactttgataaacttgagctctatgtgttaaggaatatattatccataccctctgatctacttgaagaaaatagatttagattactacatcacgagaagcttgtattaactgattcagctactcgcgctcatacggatacatctattgagcagaaactacaagaaatagaaagacaatatcagttgaatgttatgttgagggatagaattcagaacaccaaggaactccttacggaagtggtacaattcaagaaaaaggtgatagatcttctacgatgcgacgataacttgacaactgcgttgcatgaattatgggacgatctaaaacctctagatgtggctgttaagcttattacaacaagattaaagcagatatatttggagaatgaggaattctattcgattgaccaagtaaacagactggtgaaaaggtataatgaattgagaaatacttcaattgtgagaaacggctacattgataaaaaatctcaacatattttagatgaattacacattagtgttaattcaactcagaacaatgaagattctacaaatacctctattcgatcattgcaggaagatgatcctgaaatagaacatccagattggtcatcgatgcagaaggtaatataacctctgcatctacaattctaaatggagaaaatacacgtgagctgggatcacgtatcctgatggaaattagttaacaataaactttgacttaatattattaaacagtgatatagtaattaaataatagaggatgaataaaataaatgacagtgccagtaccctaaaaagtaacgggaataattaaagtcgaaacatgataaaaaaataaaaagtcgatacagtaccgaaaatgatgaacgcctaggataataaaataatgtaatgagaaaaaatgaaatacaatgtaaaagtccgcctagttgattaataggtaaaagaaaaaagaattagcgaagtgattgatgcgaatagaataatatatcccgaaattaataatgatgagtgatgataatacaatgatactgtcggggaataggaaacaaataaatggtaaaatcagtctagaagaaggaggaaaagaaaaaaaaagttgaaatagaaaacctgaaatcaagtccacaagtgggtggacacatgatgatgaatgatttgtttagaaactgtgaaaaattgggtatcgtgtgagagtctttgtacctggagtcgataacagggacagtaaagatgagcttagtgataagaagttacaaaaacctcttgaaatgagaatcctgcaaccaacctattttctcataggcagcaaatagtctggaggctttgtttacatcgatacgacatgccttttgagcatctgtcctcctgaatggcataccttgttttaaacgatgcaccttttcaatgaaaaatcttctcttagaatccaggtataaatcgcaaggtaatcttaagatttgagctaaaactaattcagcaggatgcaatttatttctcaaaggatcatgagataaatccattgatgaacccttccaatcaacttttaagcatttgttgttattcggaggtagagtatccaacgaaggagaatagtcaggcaacttttcccaggacatgttaaccgtatggtgatgatggttagccgaggaggagcctgcagcagtagtgatggatgaatgagatagtggtgatgggtgatggtgagaaacgggtttcctccttgaaacaggagttaccggtctttgtcttggtaaataaggaacagcagaagagtcatcggaagtggcaccaccatttctagtactagtggtattaccgcctgtggtacgtcttgttctgtaaaccctttcgaaatcggaattcgaagcataggtcttgttcgaagttctggttcttctggtgtatcttgaaataggagaaacacttcttccgccaaagttggaagatatttttggtttcagaactttatactgggacaaaaaggcatttatgtgcaattgataagtcttggttccgttttccttattgtaattgtcccaaacacctttcacaacgatcccatcgagagacgactcttcagggtgttcttgttgttggtcaatttccttcagtttgatctccaatcctgtgatattaagcggttggtttcctctagcaacaaccgatccatcttcggcagaagtgtgcgaggtattgcgatgcgtatctgtttctttaggagaaagtggcggggaggggatcaggtactcgtctacaggttcgtacagagcagcatcacggccagccatgggccttggtgccaacaaagtgaacccgttcccaagtatcacagcacgtgaacctgtttcatcctgagtaatattcttatcgatgctatttgcattacgcgaaccgttagcatcggatgtatttgccagaatcctttcgttcaaactcgagataatgttagaagtgcccttcgggtgtactatcgtaccttgcccttgcaattgtatgtgttctggacgaggtgaattgaattccatttgtgttgtgtaagttagaaagtttctttttttttctctgttcaagtttcttttaaatttaataataatgcgatgagatgagtataatcaattcaaaaacaaaccgataaaataatattctttttcaattagtagctagattcgggacgattgcaattggatatcaattgaaatactaatcgtttgtgtatatgattgctctcttgagacaattcaattcaactcaatcaataatttagtacttttctccgtatcaacaacaatgataaaaacataaatagtagatagttcaagtaccagactgactcaaaaataaaaacactcaactgtatatttataccaggagacggggcaaaacaaacaaatccgaacaaaaaaatgcctttctctcagtttctttctgcaatgatgtatccagaaacagaaacagtcactccgtgttttctggtatctttttgatttttttttttcttgacataatacaaaagtaagacaaaactcaaggtgaaagaaagcccgaagtaaaggtcaattgccgtcagcaatagtgcgatttgtaagtgactttacaagcctcttagcagtggggtgttcggtcatggttattccatggccgaggtcccttttagcctctttttacccactctcagttcaatcatgttactctctctgctttctggccgtatgtcactggttaccatggaactgttttggggggaagagaagccagagacatcagatggtgcgttgatttctgtgtcgcctgacgccagtaacgggggtcaaaaaaaagaaaagtgcttactaagggaagatgacttaatggaaaataaaagaaacggcggaaagtcgtttcttttttaaagaattgcacgtgaatatcacgtgcaattcagcaccacaacggtcctcctcctttcttcaaacttggtagctcgggtttatattccaagtgtcgaaaccaaacacttgcttaatcaggtcgtcaatctcatcagatagggagaaatcgtgtatgttgttcatttgatggaacccttggaaaccctggtagccctggtaaccctggtgtgggtttaaatgcgtctgatgtgccgagttttcttgttgttgttgttccaattctagatcctcttcttctatcttgtttggtaaatcgtacatgtttgatagatcatggaacacagatttgaaccaatttagctcgagggacaagttcggaaaaacggagtcgatgacgctgtcggaccccatagatttcaatttttggaaacaggaaatcgatagcaaacatgtgtataaatggtataaagtagcttgtcttaatccgttaccgaattttaatttcagattgctcaataacgtctttagatcacccaagatttccaaaatcacagtcttggattcctcacagtcttccatgaacggcttgttgaacgtgattaggacgatgtagtaatggtaccaaaaatacgagatagttgggtccgtactcatatcgacgctttgtaccaggctcttggaccatttgaggaattctggaagggattgcctccaattggataccttgaggttgaattttttcaagtattcaattcgccttgatgtggtgttaggctcaataaatatcttcgacgtgaagatctgaataattctggataaaatcatcaaattctttaatggttgtgaaacttgtaacaccgtttgggattcgtacctgaaatcttcggttccctcaatctctggtagttcatcactctcgggaacggttgaatttgacaccgttaaactgggtgctcttccaagaattaagcatataaaatgatccgcaatgtaacaaccccaatatattctggatctgatttctaattcactgtcactcaaatcttggttctcgttgatactgtcatcagtgatccacactttcggatctaattggaaccccatgtcatatccaactctgatagcaagtccactgaaataccatgctaattggttttcaccgtttcctaattcgtaaaatgctaggcacaatagtgcttgtaccgtggtgatcttggctatactttgctcttcaaatacaattttcaacaatcgggtcttggctatttgataatatttctcggataaatgatgtaaatctttcgacaatctacttcctatggccgctactgcatatattaactcctctgaacaatgctgtgaattatcatatgtttcatctgtatgattgaagaatccatataagaaagactctctatggacaaaaatgaagtttccagggtaaagccatttataaaaattggacaaactttggatgatagcgggatctgaatttaatctgccatcattagggtcgatttggtttctaacaatcaccgtgctcttcaaatcaccgatacgttgggtaggttgtgaaaatatcgaggtggtgtcccgtttacgtttcttatatgacgtaggaccctctggataaatactgcccttcacaaactttttatttctcaaaacatcatgatgcacagatgagttggatagtgaagagtcgtttgattgagcagaaggtggcctattgtttccaaccgtattctcattatcgtcaacatatccatcagagggcacattgcacgagctatctacatttgaaggcaaacttttgattaaaacaggtgtgttgggtttagctgccgtgattggcgacccagtagacggcataggcgataaaccattcaaaacttcgtcaaccataagtcttttaatatcggttgcatcttctggcaaaatttcatcagcaagtttagcatactgtcgtagccgaagctccatttcggcaacatggtcttcaagatttttaacgtatgtcaaattatacctcttcttacgcaagtccactttgttgatattacatccaagccctaattcttgacaccttccacagggatactccaagtcacatttcttccgacgacgacggcaatttgcacaagctaaacgcttagcaggtggttccgaggatgcttcactatccatttgaagtttagtttcatgttgtgaagtttcatttttgtgttgctggtgggaagtatgcttctcgaagtttaccattaatatccattcactaataaaatcaaacgatacaaccagaaaaaaggctattgtgaagcgcaaattgtataggtaaatttgtggcaaaggcgatatcttctttgtataccctaccaacagttcgtttccagctacgtaactaaatttctaaaccttattttataccgctgagtcgaataacttagcatatacattttattcatgttggttatttttcaccgttcgttttatttttttcgggaattaatcactggtgttaatgcatagtatactcatataaatagtgaatggatagtaaatgaatgatgatacgtttttagtgactaaactactcaatcaagtcctggctttgatatcttaattatgatgaattggtatctatggtaacttatttcataaatctacacagagaatgttatcaattatgaaataattcgaataatataaacctgtcaagagagtttgcattgtacgaaatggagttgaacttggaggtcataattcgtcttgttcaaatagctcatcagtatgttcttccaaaggtgcaattggcaccttgagctggatactattcacaaggtctgctctgaagttgtttaatgaaatgaaacttttagaaaggagatgataatgtaatcttaaactcgttccagcatctatctctctccattttttcatgttaataatgtatgatgacgatagatcgtagaatggtaggtcatatttctgtaaatactttttccagtatccgaagttccagtacgaaccttcttttgtttttgccggtttcaagtagaacacagcatcagagaatgaagcaatatcgttccatggaatagtgtcacttgaatcatcagttaaagaaagtaccactaagtagtcaacgttttttggaaccattgtgtctaacagcaaaatagatttcgcctcaagctcttttgctgagaaccgctgtggtctcaaccataatggccaagtatacgttaacaaatgatagtcaactgaagctggcatttctcggacaattaacttaggtctctgagctaaaatataaaattttgctttgtcgccaatttctttcttgactctttcaattcttttaacggccacactttcttgtccatcatgcacgacaaccattacattcactctgtcgtctttttcgttcataatttccgcagtagtctttctcactttgacatgaatttgggtaggcaatgagttatcaacatcaaaggattctacttcaatataatttgcttctgccattgtcgacaatgctgtaatctcgtaacttgaatcacagttttccaacttcaatcccttttgcaagctaggtaatgataattggacatatccaaatgatttcatcgaaagacctttatcgataacatttcctgcgttgtccattagctgcaagcatacaccggccagaccatcaataatgtcaattgacacatcgtcaccttcatcgaatacatgggcttcaataattattgatttgtcatctgggttgatgttatgaggataatcaaattctgataagaatccattatctgatatcccggttgaagcattgtagaatctatgcactgggttcaatgttagattggctgtcggtaccaatgcaacctctgtttttacaaatggcaagtctttcaataaacttgacaaatataacaaccgctgtgtcctttcttcaacaggatctagcaatagagtgacgttgattacagattgatcagagcggctagtgatagtgtattcttctaactcagaaagactcactcgaggcattgaggattctgtagtgtaaggtattccgttattcaatacaaggtaaccatgatgtacatatttgataacagcagcagtaagttcctcgatagcagatgggttcattatgttttcgtccaacgccccgatgtgatgtagtgtcttcaatacatcaagggtgcgcgaagaatgatgaaccaaaatgttgtgccataattcaacagaatacaaatcgtcatccgtattgaaaaatttaccattgattactgcaaatggtttacgaagagctttaatagaaatatccggcaaccaagagcttaaaacattcaaaaagggatcaacaatgaaattaacagtcgtcttagaggctattttacctgacaacttccctgtgctgaattccattttaaaattatcccaactctttgacaaatcaccaacgtgaactagtctgaaactaacacttttgtgattgttccttagtagggctcgtatcttctgaacagcgctataagagttgaaatcatcgactaaagtgatagtatgaatgggtgaagtcttttgattcggatcagaaaagattatcgtgcgactaccgagtacatgtagagcgcggttgttaactctggtgaaggtttcatccagcatacggttaggtatgtataccggatttttcaatgtcaaggacctatggtgaagaagttgccttactgataggttagatgaatcacccaaggcctgcaattctgacttcaaatactcgatatcggcggataatatccttgaagtatgaatcttccatgctttagcttggaatggtaaaagtacaccattcattgctatgcaagtatctgctattttgaatctctcaaggtattcatcatacgcactgcctttgtgttttgtctgaggttgaattttttcagagtgtccaataagagttcttaagtaatctattatcgactgcagaggcttgtcagattccgacttcaatttataaatcatatcgacaacagagttcgatccagaggaagaaaatggaattaagcccaacctgataggatatccagtttccatctgatcgattgcttgtaacaatgatcctacagcaccgtcatctttgaattgtgtcatatcgtcaaagttaataaaaaagatgagctcattccaattctgcttgatgctaggaattggttcgaaatcagatggttccaaaaacgccatattgtcttcaggcaggtccttatatagctcatccttctcgaaattattgaagaaaactacagcttcagagaaacctggagtacgatagaaatcgtaacgatttttgtcaaagtaagccgtatatgagtagccaaccgtgaaatatttcaaaaagttctctaactcagcaccggggaacttacttagtttttcttttaaatcattaaccctagaccattccttagcgaggatagcaggtaaagtagtttcatctaattctgacaatctccactgttggccgttgatgtacaagccaagtaattcatgagagatttttctcttattgaagtctttaacaatattctttgctggtgttgtatcaatgttgtctttagaagcaatgactggtgccactgcaggaaaattgtaggacaacgacttgaaatattcaaagaaagaatcgaaatcatgatcttcattgaatttctccaacaataacgcggtgaatttcatatccaaatcttctagttccttttgatccaagtatttcaatttgactggatccttaatttttagatcagaatcatcgattacaaggtgaacatttgccttttggtcccagtttttgtccgataatgtggcactcaatgcatattctggtgtatcacctatgatacaggtcggtctccaagtcattctaatcttaccaaacttagcctcattataaagatttctgttgaaatcagcaaactctaaatctgtttcacaaccgtaaagtaccacaattggagcagaagcattagttccgattgcaatctctctatcttttaacacatcgaaatctggaacaagagcttgagcatccaattcagaggtcttgaaataaaatgagtcatcgctcttagagtatattttgccattcaaaacaaagcaagtttctttgaattcatcatcaattggtgcaatctgtacatattttgaaatggcaccggacaagccttcgacttgttgtactttctcagccgaagctgaacttatagattcctcaattccttcatcgtcatcttcatcttcttcatcctcttcttcatcacttaacgttatttttctatacaactgcatccattggtcggtagacaatgcatcgtaatcaacaagggacgctgaaagccatctcttaccaattccttcattaaatgcttgcgttatgtgcaggacagttaacagcaaaaacacaattcgtaacctaaacaagaccatcgtggttttgcaccgttttagatcaggaaactcgttcactcaatcttgttggaacacaaactgtcaaattgtgctgatctaaatactctctttcatctcgaattctgatcttaatagaaggcaaatataaaccttaaaaatcttgcgggatcttctgccaataaaaaacttttaagctggaaatatgaagcatgttaaagtcctacacatgttatagaatttgtaaacctcaccattactataatgctactccctaagctagtactatgggattttacgcatgtctatcagatccactggcaaggtagcttcagccactttcgaatgaagagtcacgtgagtgtatttctcacgtgactcctagtttctttcttcattggctctatctatctgtgaaacggaaagcgttgagaaaaatatcaaaaagtgatttgaagatattctggaatttttgaacaattaacttatacataaaaacggatgagtagaaggcttggactcaggttcagaggctactactgctctttcgtttgttgtattcgaaagttattgaaaaccttaggcggcatattcagagaactagggggatttctgaacttttttcccgttgtttcaagtcgttaatttaatcattactcatcgtttttagcggtttgattaaatcttcccgttcttgattagaatttgctttcgaagacgtccttaggaaaggtgtttcgcgttaattgcaggttattttccagttttacagctaggatgacgattggtgataagtctaagtggacggctgccaacgttcgttccacatttttggactatttcaagtctaagggccatacttttgttccatcttcacccgtgattccattcgatgatccaactttattgtttgccaatgctggtatgaatcagtataagccaatctttttgggaacagttgacccatccagtgatttttacaagttgaagagagctacgaactctcaaaagtgtatcagagccggtggtaagcataatgatttggaagatgttggtagagactcctaccaccacactttctttgaaatgttgggtaactggtcgttcggtgactatttcaagaaggaagctattgaatactcttgggaattgttgaccaaagtctacggtattccaggtgatagattgtacgtcacttatttcgaaggtgacgaaaaattgggtttggaaccagacttcgaagctcgtgatttgtggaaatccgttggcgtcaaggatgatcatatcttgccaggtaatgccaaggataacttttgggaaatgggtgaacaaggtccatgtggtccttgttctgaagttcattatgacagaattggtggtagaaacgctgctcatcttgttaatcaagacgatccagatgtgttggaaatttggaataacgtttttattcaattcaacagagaacaagatcgttctctaagagctctaccggctaaacatgtcgatactggtatgggtttcgaaagattggtgtccgttttgcacgatgttagatctaattacgacaccgacgttttcgaacctttgttcaaccgtatccaagaaatcactggggtcagatcatacactggtaaatttggtgctgaggatacggatggtattgacaccgcttacagagtcttggctgatcatgttcgtacgttaactttcgccttggctgatggtggtgttcctaacaacgaaggtagaggttacgttttgagaagaattttgagacgtggtgcacgttacgctagaaagtacatgaactaccctataggaaactttttttcacaattgtctgtcactttaatcgaacaagttaaggatatgttcccagaagtcgctagagacccatcttatttgttcgaaattttggacgaagaagaagcttctttcgcaaaaactttagaccgtggtgaaaaattgtttgaaaagtatgctgaagatgctttgaagaaagcagacaagactttggatggtaaacaagtctggagactatacgatacttatggtttccctgtcgatttgactgaattgatggctgaagaacagggcttaaagatcgatacaatcggttttgagaaagctaaacaggaatcatacgaggcttctaagaaaggtggtaagaagggtgcatctgatttgatcagattaaacgttcatgaattgtctcaacttaacggtgataatgtcgctaagactgatgattcatctaagtatgggaccgaaaacgttgaagccactattttgagaatatatgatggtgagaaattcgttgactctatgaccgaaattggtaagcaatatggtgttattctagacaaaacttgtttttatgccgaacaaggtggtcaagagttcgatacaggtaagttggttatcgatggtgaagcagaattcaacgtcgacaatgttcaagcctacaacggttatgttttccataccggttctcttggtgacggtaaactatctattggtgacagtataattgcttcttacgaagagctacgtcgtcatcccctaagaaataatcacactggtacacatatcttgaactttgctctgaaagaagtgttgggtaatgatgtcgatcaaaagggttccttagttgcaccggaaaagttgagattcgatttctcgcacaagagagccttatcttatgaggaattagtggaggttgaaaaactctccaatgaaaagatcagggacaacttaactgtgtattacaaggaagttgccttagatttggctaagactatctcttctgtccgtgctgtcttcggtgaaacttacccggatccagttcgtgttgtttctattggtaaggccgttgaagaagtcctagagaacccaactagtgaagaatggcaaaagtactccattgaattctgtggtggtacccatgttgctaagactagtgacatcaaagaattcgtcattgttgaagaaagtggtattgccaaaggtatcagaagaattgttgcggtttctggacctgaagcctatgaagtacaaagaattgctactgaatttgatggcgaattaactgcagttgaaaaactgcctttctcccctttaaaggcccaaaagctaaaggagctaggtgtcagactaggccaactaactatttccgttatcaccaaaactgacttgaaggataaattcaacaaaattgaaaaggaagttaaagatgaactgaaatctagagctaagaaggaaattaaacaaactctggacgacgtcaaacatcactttgatgctaacaaagagtcttctttctacgtcaagcatattgacattccaactaatgctaaggccatcactgaagctatcaatcacattaaaacaaactcgaaggacaagtctatctacttattcacttgtaatgaaccagacggaaaggttgctcacggatgctacatatctgacgcagcaattgctcaaggtgttgatggttctagtttagccaaaacagtatcctctagcatcggtggtaaagctggtggtaagggaaatgtcttccaaggtatgggtgacaaaccaaacggtattgactccgctgttgcggaagttgaagccttgctaaaagagagactgactatctaatttcacccgctttaatataaactctttggctacgattggcttgaagttaatctcaagtctcaaagttttgtaaatatatgcatgagaactctgattttcaactcaactatatatgatattacttgaaagatatgctacgccttttgttatatagagaatgaattatctgatatttacacaatctgttagttaaggttggtgatgcggcaataatgcataaaatattggacatgcttggcgtattctcgttcttcttctgtgacttgaatgcgacaaaccaaaaaaaaaaaaaaaaaaaaaaaaaagagagatgcttcacattacaagatttagagttatgatggagatcaactgtgaaggaatcaagattttgataaaggacggttgtgcaacaacgtttattcgggggtttcatcctactattaataaaacttgctgtcataataggcaaaatagaagaaatccaatggttcgtttaaagagcagatacattcttttcgaagtactatatccagatgtagatgatgagtacgaaacagtgccagatataaccaagaaggacattttaaccacgcatcacaaagtatcaccaaatactatcagtccgagaaatattttgcaggaactacgaaaacaattacaggtgaatttcggggactatggcttgggaaaggctacggctttgttacagatcaaatacttttcgaatagaacatcaaccggtataatacgatgtggccatgatgaccatcagtacgtaataatggcacttgctttgatgaaccagattgaatctgttgggcccatcataatgaatccaataaaagttagcggaactattaaaaaagttgagttatttgctatcagaagaagtcaccgtttgaaccgaatacttctgacagatgataggaatgatgagttttcttcaatcactgacgatgaaaataatgactgattcgctgatttcattcaattagtagtgcttgaatattattacatacaattatatcagtatatcggtatcgcacaattaagaagtatgaggcttcttacgcacttgaagaccgtattctctggcatgctcgttatcttcctcattctgttccgcatttttgccatcatcagcagcggagaactctaccggtccagttcttcctttcttatttgagagtcgatcaacaatatcttcgttttctaagttagaaccagtagttggcctgtaaatgttgtcaatctggctattattgaacaatggatggtcgaaaatttgatttgaagatgatgccacagatgatgccgctttcttgaacaagcgggaatcgtactgaagatctggggtctcggtggcttttgcagcatttaaaacaactttatcagaaacatctcttccttgttggtacgccaatcgtcttaacttttctgctgtgctcattttattcgaccgttccaattcgcgttctgctctcctacgttgattacgctccatttccctaacataatgatcttcattttcgtactgtcgcctattttccctatcctgtctagcacgttcagctaagtgacgtaacctttgttctttttttaaagtttcttccttctctaactccttgtacgcctcttgcttaatgttgattctctgtcttgcttctctttctgcttcgtctagtgcctcagatagcagaaggaaattgtccttcttatcattatctgggcagtccgtctttattgattcaatagcaactctattatccaaagaaatagcaaatccgttaggattcttccagttcgaaatggcggatggaattctccatttatcaagctcttcctttgtaggtttaatactagggtcatccgacttatgaagtataggcgcctgaatttcttccgatggtacaacgaccttccttttcctgtgtgttaccggttgtaaaggatccttcttatgttctattactttaactgaacgttgagtaccagattttacagagcttattgcttctctttttacgatgtccttgttcgcaatagacgataattgtagagagctctttttcgttagcagcgagtctagaaacgccttagtctttacatatgtttgattaatctgtgatgtcgatgggaacggtgcctctagtgatatatcacgttgtctaagaggtacaaagtcagatattgaggccactggtagattctccggtcgtagcttgtctaatattattgtatcctttatgttttccttagattgtctagaaaatgctgaagactcggagacttctgagttttgcggactcggtagcaatgagctgagtgtcctgaatgacatgtcagaccgttctagtggtgttataacaggtttgttcctatgtttcaagccttacctactttactttataaattatgggaatgttcaatagttaaatattttctctaaatttcaaatacattgttaaaagttgatattataatggaaataagttcactgcaaatagaaattaaaagattctttctatttaaacagtttatccttgattttacccactattttagtatccgccccttgacctgatgagtacatgctgtcaaaaccgaactttttatcagaaccttggtctctggagatcaaacttgtgcgaaatgcaagaccctcttgagttgttctgaatttttgaagtgagtgctgtgcaggtggaggtggataatgcaacacggcaggcttcttgtaccatccgcgtcttttaggctcagggttttcatcttgtgacataggcggaacccctataaatctcacctttttcacaataccttcaacttcgctgtcgttgtttgaagacgactgattgtcatcggcaacagaaactatgatcttaggagtttcactaccttctggagataacacttcctgagagacgattagagtatcatcgtccagcttcagatcgtggaatttctcattgatgtcatcttcgtctacttcatttagcttcaatatgttcactttgttcctctgttttacggaattctgccgtgacacagttggagaaggtgattttgatcttatagaattattcagctttgttggtgttagtcttgggcctcttttctcatttaacgagagtaatgcttttgaatatgcattctgtacaattctttgtgtattcagagaacctgattgaagagaattggatctcataccattccgagcagtggaagtatcttcaagacttgatactgattgcaatgatgacgatctgtttcttgttctgactgatctggtctttttagccgatatattagacttcgcatcagtgaaaggtattggtgatgatggggaccttgattcttctgaccgcgaaactgaagatgtccggctcagtcttaaaggcgataaaatatttggagaaacgtttaatgaggaagaatttgaagttatggaagatgaagatgatgtgtttttttgtgaaagactggaattctttttttcctccctttgtctttcttgttcctttattttttcgttgtatgctagttcatctacagctaacttttcctccgccatctttgccatctcatcgatgttcatatcgtcatatttgctggctttcatgttatctgatatacttttccattgggtgctaaacgaatcaacgagtttagcagctttccgtaacatctgcgtagattttaacaacaatctttgatatgctgatgagatgttgttaaactgaacttgataaacagtattctggtttccatatgacttaaaggcctctataagatctttttcaagttcctgtgtgaagcaaaacgtttctaactcttccaatagctcagaatattcgtgtagattctttgaatgcaatttggtagtgttatcatggaagtgatgtttatttggaatgtaaatttgtctcaatacagcccgtatcacatcgatgagacattttgctctaagagatgcagcatacatcctatgcaaagtaaactgccagtatggcaattggatgagaacattattcgagaaaacgccctttgttcggctgaatttcattatactagtgtaatatgatcgtatagggggtatgcacttatcattgaggttagacctgaatttctctaagattggtaaagccaaagcaaagaaggcagagctgcttgtatcggttgatctattcctaatattaacaagtaagtcaagtccgaatgctaactcgtttggtgaaagaagatcgtttagcgcatcttcgttgaagatagttgtccttccagataggtctgtaggtctgtttgagttcctttccatggtcagttgcctaattcttgcttggtatatctgaagtgaatcttctgctactcgttgtaacgtggtaagtaattgcgattgtaattctttgttgtagaatttactgacgaacaagacagagtcttcttccaccggtacaaggtcaacctctagtttgagagaagtggtgctcaatggcagatttgtagcattggctttacatgatctaaattgtgagagtagttcgatccttttttctatggccgcagatacattaaattgaaaccctgaaccaagagctatcacgatgtttgacaaggggataagattctcattactcttcattgacaaattcctaagcaacactttacagacgtgaaccagttgctcgagtttccgtatcgatgatgtatattgtatgcattttatatctgtaaaatccaaatacacactacccttttccatagatgaggaagcactagctgccgccttcgccagcataattggaaaaaaacgtaattattgcagttctcgatggtcccaaagtagatataccttctgataagtcagcgaatggtgtatatttgcttcaattgcagccaagtcttgccgagtacgatgtctcttttcagttgggcgaattttaagaaacctttttatttttttttttgacgttgcagaagataccaaccagatggacagagatgtatcaagaattcgcaaataggtaatcataaaactcatgatatttgtatcacaagtaaagttattgctttaatctataaaaatgtttaaaaaatagagataacttgcttgcgatcaggaaattatctatttacaggatgtggctatacggatttttcacttcttgtcgtcatctactaaccatttccagatcatgtctctctttgatccatctttgtacaatacttcacgtccagaccataacacccttgcactcgttaaccacctatcccagaatgtaggtatttctttgtctagagctaacttagcatttgccaaatgctttttattgttagcaccggtatgattattcaatagtgtcaattttgtgactgaccttagagctctcatatttgtgatagttacaactgctgcagctgctactgacagtccaactacactggcaaatccccagtttgaatcttcgatgaagtttttcaaattcatcccataaaatgccggaacaagtgtggccaccgtaaaacctaacgtataaacagtaactttcaattcgaatagcaacaatgagttccggttggcatctagaataatattgacaatttcctcggtagatttgatatcttgaatgagagattcggattgttgcacatattcgtcacactgtttgtaatatgtctctaagagcatttcaaggtccgaatggtcgtcagcatctggatgcttcttctcgctgaggtacattccggccaaatcctcatctgactctagaagttcgtctaaaaggtcacgtagtaagacactcttctgggcaaaagcagtcaaagttttggatttgatcaaaagatctctaagcttgtctcggtcaatctgattctccaaatcgttcaatatcatcccacaaacagaatgatgatacttgtattccgtttccaaacaggtcatcacgtttatgagtattgattcgagggctctatgttcataattttcctggtatgagacagatttcccttggtaattgatattcctttgagatagttttgattccaagtcatacattaacacaccaagttttatggcggcgtcaggatttgtagtatcaaacacgaaaactttatctttctgtatcattgcttttatatgtaacacattcaccaaaatgcacttaggtttgatgacaaacgaaggtattacatctattgtactcgagtcaatcttcctcaaatctcttggatataacccatatttctgtaagaactcccatttcgggaatttatgagatacagcagtcacgtcacctttctcgttgaaaatggtacatgatacgtaagattcatgaggcgtcacaggtttcaccaagaaaggatgctgtgttgaagcgattggtttgatgagttttgtcgtcgagttccatcgaagttgtgatcggacggctttagaagagtgtcgaagttggatttgaagcccttttccaaaacggaaatacataagagatagttatgtcagcttgatattctatgctaaagctcccagttgaacctcagttttcaagcggtattcttagatctatgctgaacttttttgtttcaacagatacttgtgtgcaatgaaagtgtttgcacaattttgtcaatatatagaaattagcgaacgtacattgcaaatagaaatcaaagggccacaagtgaactgcaacacggaaagacagccatatatccaatatacctagtcttccagcaccgtgtgagttctcctaatattaaatcgaaattatccatcttttaattgcattatttatctattatgtcgtctgttatataagaagtgagtccgatgaatcacgatagccttattttaaatcagaggaacatcgtaataaggtcaatcttgcttctttattgaaacttatgtgatcaatcgaagaactttctggtcttagatgggccgaacaattctagtctgatagcaggtaacgattcttcacttaacaacttcaatctttcttccaaagtgttatcgacttcaattctcccgtttccgttggaaacaatgacaccaccagcaatgtctttgttcaaataggagctggaaagctcgatcttaatgggcttgccagttttttcctcgtattccttagccacatcatctactaaagattcgatgatttccacgtccgtttctctaaccttgatgatagcacttggttcaagcaatttcaacaaggattccaggactaaagaatgcaaaactggcttgtattcctccttcttagaagaaatctgctttaattcagccttggtcttctcgaagatgctatccaacacttcttctcttgttcccaacactttcaatctcatcttattggcgatagtggacttcacaatctgttgtttcaaagcagccttcttcattctagaagcaatgttattgtcaatggcactggtctcgttgcgtacaagaccagttttctcaatttcatactcctgttgagctttcaattcaatttctctggccttttcctcagcttccttcttgatgaaagcttgcatcttttgcaattcatcgttcacctgattaggtgatagcgcagtaatcgtggacattgttggttatatatgtatcttgatcacctagactaactcacagagttgttatcactggggactacaccttcaatgacctgacggacttgtttctatccacttgataacagtagaaacgttcttatgttcctcgtattataattgaacttatcttggtagaaaatagcctaaaggggtgatcgactatattacccggatggttaggtatcacgtggtaagttattctgacccacatccataaataggttactgtcgaggggcagatactgccaattggtatcatgtcttacatggatggctttcgtctctgatacgcataatggtctgcagtttggattagcctgtgtgtctcttttaccggtcttatgcttgatattaccgatatatgtgacgatttctgaatatttacaggctatttgagaacaaaaacagtaaacaacaacgctgaattacaagatgtgctggaccgaacaagaggaataagagaccatttatagggattaaaccctaaatatcatcgaactttaaaggtacgaagctatttctcagattcataacttccaattgagtcaaggtttggcgcctttgaattgtcaagaaaggcattataataaaggatgagatattcaattcgtttattgcagaaaggtgctggaagcataaggagggtacgatacttccatagatctgctatagtaaaggtggaggaagttgaaaaaccacgtatcaatccggtaggcattcagtacttgtcgaatagtctacacgaacaaattttcccgagcaaagacaagtataacaagttctttactgaagaggagaaacaagagctcatcaatctgtcgaagacattcttgaggaaccatgatctattggggaagccaacgaatatctccgatccaattagtttcgaattaccgaagttacaaggtcgcatattggacgagcatttccaaaaattggggcattttgcatcggagccatacaagagtatgtgtgacaataaattcaaaaatattgtaccgaggccaaagaagtggttgcgggagagagggtggtacagatatgaaccaggtaaggaaccagaaaaagtgccttatccacttgaagatactttagtatttgatgtggaagtattgtacaagatttcacattttccaacgttagcagtggcattatcagataaggcatggtacctgtggtgctcgccctttatgtgtgatggtgaaggtagtgacaatttcaaacatttaattccaatgaatactttggaaaggccaaaacttattgtaggccataacgttggttacgatagatcaaaagtacttgaagagtacaatttcactccttcaaaggcatattttatagataccatgtcattacacgttgcatcctccgggatgtgttcaagacagcgacctacttacatgaaaaagctcaaaagagatgaagaagttgcacaactcaatgcagagaatgatgatttgcctcctatagcagatgttgatgaggatagtccatggataaataaatcatcagctaattccttgaaggatgtcgcaagattccattgtaatattaagatgtccaaagaggctcgtgaatcgttcgcaactttagacaaatttgagattataaataatttcgattccatggtagagtactgtgcatttgatgtagaagccactagcaaagttttcgatgaagttttcccgaagttcttgcagaaatgccctcatccagtttcatttggggcgcttaggttcttatcgacgtctatcttgccaacaagagttggcaagtgggaaaaatatctgaattcttcagagacattgtttcaggataataaagccaagatcgaagacaagattgtcaaaatcgttgaggatactctacagcttaaaaaccaaaccgaactaattaaaaatgatccatggcttaaacaattggactggacggcggtaccagtaaaatataccaaatcaggtgaaatccgtaagaaccagaaactaccggggtatccagaatggtatcgatcgttatttccgagtaaatcgacaaccaggcctcagattacaataaggacaaggcaagttccgttatttttcaagttaacttgggaagactgtcctgtagtatatacaaactcacaaggctggtgtttccgatgtgacaattcccgggtggaagaaattttggctaaaaactacgttaaagcagtggaagttgatgattaccatgaggaagatacgactcttttcaagatcccccatccaaatggaccggaattcaattgtagtacattattatcgaaacctttcatgcattactttgaaaaaggtgttctaaaatcccaatctaaacttgctcatgatgctttacagataaatgcatcaggtgcttactggatgtctgcgagagagagaatcatgtctcaacacgtagtctccgttaatgattttaagtctgaattcaacgcaaagactccttttgataaagaccttgatgttggaataattttgccaaaacttgtacccatggggacggtcactagaagatctgttgagaacacatggttaactgcatcaaatgccaaaaaaaatagaattggctcagagttgaaatgtaacgtcgaggctcctcctggatataccttcgtcggggcagatgttgatagtgaagaactatggattgcttctttggttggtgattctatttttgatatacatggtgccactgcgattggatggatgtgtcttgaagggaccaagtcactaggcacagatttgcattctaaaacagctcacattttgggatgctcacgtgacgaagctaagatcttcaactatggtaggatatatggcgctggagttaaatttgctgcacaattattgaagaaatttaacccaatgctttcagaggatgaagctaagaaaactgctgaaaggctttatgagaacactaaaggtaaaaaacaacgctcaaccattttcaaaacattttggtacggtggatcggaatccatcttatttaacaaactagaaagtattgccgaacaagatgaacctaaaacaccagttcttggagctgggatcacttattctttaatgaagaaaaacttggggaaggacaccttcttaccttccagaatcaattgggttattcaatcatctggtgttgattatttgcatatattatgttgctccatgaactatttgatagaaaagtattcgattgatgcaagattgatgatctcaattcatgatgaaattagatacatagtatctgaaaaggacaagtacagaataactttagctttacaaatatcgaatttgtggacacgttcatatttcagtgagcaaatgtgtatcaacgatttgccccagaattgtgcattcttttctgctgttgatgttgatagagttatgagaaaagaggttgacatggactgtatcacaccatcgaacccaaatgctataccacacggtgaatcacttggaattcttgatatccttaaaatcaccaatggatacttaggcgaaccgacggatgctgtggatgtttctcaatttccgtataggcatcgtgagtccgttttcagacaatataacaaaaggtactcgaaagatttcttaaggtactctctagctatgcaaattcaagatacgaagtggaagattgacgaaattgaaaaatcttatttaagagctatggaggaagctaagttcagattggttgataatgaagtcatgacaatggcggactatatcagaggtaatacacctgatggaaaaccaaagaaacaatcaatcatgagcgatgaagtaatgtatctgaaggaaaatgacatctttgatattgacgcagaactcggcaagaagtcgaaagaaaagaagaatagaagtttcaagaaacttgctgctaagcacaaattgccttccattgataatgtaagcaatgatataattgctgacatagtaacaaaagcagtgaacgatactggcaacggaaaagaaaaactttcgtcttctaattctaagatcaaaacacgtaaacttaaacaaaaaagactggactctaacaagagtatcaaatctaatggcaaatctcttaaagtcaacactacaattgggtcagactgtcgtgataactatgcgcagcgcaagagagcattcaatgtagcaatttgatgactttaaattaatttagatagttaataaccgtgtatagcctatccgatgtaatattattaacttttctaacatatccttgaatatattagaacctactcgtaaagcattcctattaacataaataaacgtctacaaactatcaatacgcacttaatcagccagaatccacagcttttcatgactatgaggcccccgcttctgcggtaccttgaaacaattatttgcaggactaagctgaaaaattgttcttttgatatgaatcaaaacaaaaaaggtctcatcaaaatgataaatagatggatggcttgaagaaagaagtcaaacaaccgaaactccacctattctatctgagtgtgtgactgtgcaaaatgtcatttgattggttgaatgtaccagggttagatatttccaatgattcacaggcctctgtatcaagttcatcaccgcctccagcggtgtcattcagtttcactacagcagacagacctcaggaacccagtaatctgcaacaaccgcaaagtcaacaatcactgaggggacgtgagggcaataaacttactgtttcaggatctacaagtaattttcaggattcgcaatcgaagtcgcacacaatagacggagctcttcactcccattcagaatcggatattgcctcgtcgtatgtcgaaactgctcaggagttacaggtaccgctagcagttccagaattccaactcactcctgatgaacgaaaagcttacttgcgatggtttagagacctaagttccaggattcattcgcgaccaataacgttggacgatgtgtttaactttctagccaacttcaggattgacgacacgattaaagaaaggattacacacatattcagaacatgtagatacgctgtaaatgaagagcagttttatgccatcattagactagttgctcatggattacagcagcatttcctacctacccgaagcatgattcccgaaaaggcacctgtgttaagaccaaaatccatcttatctgctaatgctggtcaagaagtatatgaggaggtggaagaagacccaaacaacgctactgataaaaaggtagactttgatggatttgcatctttgctcttaacagggaaagcaatacaaaagaatatcagaaggagaatcatgaaacgtagagatcagattaagaaggtccgattctccaagaatctggttacattcgcaaacgatttatctaccaaggcaatgagcagcatctcgaggtctggcaaacctgctgtcactgcacctgataacgcagcgtctactgagtctagccctagtgatgattcaactttggacctatcactaccgatggaacaattgctagcaaaattatcttcaagaaatcgaaataacagtgctttagtgaaggaattaccctcggatactcagcctgagacacaagaagaaagagaagtattagaagatatgaaggactcattgagccatttcagacagatccaaaaagttgatagtgtcacacagctccctaacaacatgtcttcatatgaatcttctaattcttcagggagagagcaggctcttgaaccactaaaaccaacagcaactggatctgcaaactacttgttcagacagactgtccctccctctcacaatatagatgctaacaaaaacgacaaccatatcctggaaccactaaaacctactgcgactggatcagcaaacgagattttcaagaatatattcagaaggagcaaacctgcggagcatttgccacagcaggggcgtactgcaccattcgtgcctccacaaagaaaggtacagttcaccgaggcgatgaaaccaacatccacaggctcagcaaactatttaatgaagcagcaatttcaagatcttcaagaatttcagccgttccaatcggctctaccatctcagcaacaacagcaacagcagtatctcagtccacgaccatcgattaatgcttttcagcctccaaatcaaggccagtttttgcagcccaatgcaggtggattggttacatcacctcaacctcaactctcatcccattccaatctatcatctgacggatatttcagctcactcataaccccttcaccaccaatgatgcccacatcgtctcctcaacctcagaacatatcgaacggcgtgaatttatccgcagcataccagcagcatattccagagtgtggctctaacctcaattatcaagtgcgaccaaatgctgtcagtccacgaccagcacgttcccagtcagacaacattttagatgatttaaaggcattgcagcagcaagtggatcaattgaatcaaacatactcatacgatgggagacgttaaaatgtaaccaaacttccacatagcgcaagagtcgaaaatatatacaaaacgatatagaaatactcgcaacacatacttaaagacaaccctagtcttcatattcacctgttccagatggcaagtggggaagaaatagaggtaacgctgcatataagtattgtagatcaataatgcatggtaagtcccaacgtacatcttaatcacgtgaccaattgaaagatcactgctgcgaaaggaatcccagggctctttttgaccagtactggggacgaatcacctcaattcacatttcactacgttaataagataggacactgcattaaattacattaacattcaaaagtggctattatatacaaaccaaagtgtctatttcatcgctaaacttcccaaattactcttttgtaataaggaatcttaggcgcataatgggattccgcaatgttccggtccaggtatccagatagcttttaaaaactttgatttcttgacgtggttgatatccaatggttcacctggtttactaagcaagggaatatcagaagtttcaccgtatcgtttgcaataattgacgacataccttgtcgctgattcaatgacgttctctttgaacgattgtttgaaataactgttcaataggtcagtcttacggcgaagctgcaagatatgtgccaccgatatcctggttctttgaacgcaaggcctatgcatttttcaaatttggggtacgagaacatgatcgcagagaaaagttgttcctgtgtaccatttgattttaaatgagttttcttaagcccgatatttgctacgtccaatatcatcgtaaccgtttgatactcctcgaaagacttatagtattgacgtatactcatgtattattcaattccattgcataatgaatttgtggtgtcatcttgaaggagcatagtaacttcttagaaagtgtgcgttatccttacaaagaaaataatatgctccacttcctcctcttgataacataatacagagcagtcatccggaaatagctggagttcaggtttgaaacagttatcaaagaaaaacttcttggcaccttcagacacttttaggaaaactccaagttgggacaaaatgatgccataactgccagattatttttttttgatttgaggtcatcgacacatctatcgaaatgctgaaatgtttagaatatcgcatggcatgctttaattgctccttacattctttttcatatgatgatatgattggtaatccagcttgtgttgagctcgcttatgaaatccttcataccttcatcttcaatcatgttgagtggcataaagcctcttataaacttgtcaaggatacgaagcttaaaatgattaagagaaagaaattgaagaaatttctcgataaaaggaatgggtttagattcactggcatgaactgtcggaaataaatcgagtactctttgtttattagctaaacgctttctaaagagttcgtagtcacaattatgttgtggctcaagtgtctgacaatatttgatgaggcgggatttccatccaaagtagatctatgttcacgtttatcatatttgcacactgctaaaggtgatgcatcttttactctagtaacccagatcgcataaggggagggcgggagccaagtatcaaatttttttcaacttcttcgccaatattatcttcccctggacgcatgactaaagagggcttattgaagggattaaaagaaaagtcttcgaacccgaagtcgaatttcctcttgaatgctgcttctgtctgagatattcgttagcatgtgtttcgcttagatgaatggctgtcgattttgaatctgtgcttcgatctgagtcacttgaactgccataaccgtggaagttgctaggttgaaggaaagtgtcatgtggtttattttttgaattcctagactagtcccagtttgaggaagggatcgaaattgtttggataatattgacagcgccagtatactgtaaaggaccattcagttcttgagatatagcagttccatgctcatttactgaacatgaaccaattgattgttgcatgggcgtgccctgttctgctactttgcaattattgacattctgtcgagctcttcaaaatgaggaatcgttttgtgttgctctgttgaacataggtttttcagactcattctgaggttcagttgggattgatttactgttcgtgatttcacctgcatcatcgtcatcatcatcatcgtcatctttttggatatttcagagttctcttcacaagatgaaaagtgcgggtcttcaccttcttcacattttaaatcatattaaacgcctgcatcgtcatcatcatcgacaagtgtattaacagaactaacttctgagagacatgaatcgccctgtgagcgttgcttcctccgcactacaccattctgttctttaaaatatcttgttcttctttctcggagattgtacatcgttaaggaagctgcaacatttgttaaaatgtttcaattgatgttagcttatagtaatagccatgaagtgcttaattgcaggattatttacattgtaaatggaacatagtttatcgtgcatgtggtaaaatttcatttacgcgtaaagtttcgcgttttagttaatgtaacagtgaatcactatgtacgtatggattcgaatcattaatcactattgacggtctctattcgtccccagtactgatgcaggagatgatcggccactttagttgacttagggagcagctgatggacacattgtagcttgtaacctgtgacctgacctgacctgacctaccatgcgtatagctatagatgccgttgttggatactacgaatcatccctatttctatttcatgtgcttcgtatcagtatatgtgcaaataatagcgtattgaaagagtgcacttctcccattttacactaaaagattgaaacaacgaaatcaaggtatagcctgataattgatcaataaagatatatcgccaattaccgttgtcctgataagttcaataacaatgtctgagaatacgacttctgctaagggcacagcacagagcattattgctcatatgaataaagatcataaacttgcattagaggattttctttatgtatttggtaatgtgccaatcacagaccaaatcagtagcgttagattgaaagaatttgaattggaccacatgaccatattattccaacatgctgccattgattttgatattgagaaggtgattccttttgatccacctttaagcagtttcagagattccagagacagattggtgtcgatggccaaggaggctgccgagaaaagaggagtgtcgcacgttatgatcaacgagatgtcgtatcctcgagactttgtcgaatatttgataataattctagtgttcctaccaatagttgtttttatgaagagaagccttctacaatacttcccattaccgcagtatatcatcgattttatctccaaggacgccgtcttgatatcaatcatcatcggtgaaattatctgccatgcagcagagacctacttcttattgagaccgagactcaactaccatcgtgttccaacagatttccttgtggagtggtatttcttcggtatgttagaaggataccctatagtcaaacgattcgatgatcttgcataccaaagaacacattaaattgtagataaatctatatatacaattatatatacggctttcactgcaatttgataatgtagatgtaataccgtaccagcgttaatgtagcacaagatacaattcggcagctattctcccttgttctgtttttgcccttccagccggtttttctatagaagtttagggtcactattattgttgacatttaaacaactgatacatcgcaatgctacaattccaagagaaagtagaaggaaaaacagaccaaacggtcatagctcgagctgttgagtaggtatggattgcttctggaaatggttcaatcaattttgggattggctttatactgcgagcactcagaaacaattgagcattgcagttgttggtttgcaaaactcaggtaaaacgactttcaccaatctgatagctggagaggagtttgtggtcgacacgataccaactttaggagtaaacatcaaagatgtaaagctgccgaaccataccaatctaaaggtatacgatttagccggccaaacccgctttcaaaaactctgggatcgatgtttccaacaagtcgatcttttagtgttcatgattgatttatccgatttaacgaattgggaacaggcaaagaacaagcttcatgatgtgataatcgctacaaacctggagcatgtacctattctgatattaggtaacaaagtggacctaatcccgaagtttcatagagatttatacgttgccaagtcggatgtttcagatcaacggagttcagtagaaaactctgcgaggaaacagacatggaattacgtctctcccttgttacacaattatgaatacgaagatataccgaagtatgatttaaatccagaaaatcaacacgtattaagcaaggtagaggttctctcgaaagaattgggcatagacttgaagcacggattgcttcatttaccacatgactcgaaagtcaaattaaacagagacatcgccctattctcagtaagttgcaaagacggaactttgatagacaccgtcatcgattggatcctagaattatagttgtgccttgatatttaaaaagaaacctcgattcgaatatataattaagtatgaactgtcactcaaaggtatcatattatcctgctttttctattctatgttactaactttcaactttgcagcattttctccgatcttgtcattatgaaatttaaagaaaaagttgattattgaaagtattattataccaagacatattattcagaatgcaactgataagggttcaaaaggtgaagaaactactgggtaacaattgcgcttgaactgcaaagatacgcttaattcagaaagttaaagttttcccttcgataattttacgtaaccggagagttctgttaattggttattcaacgaattcaagtatttttattagggaagcaaaagccaaggagtccgatgctggagaaaacagatcctttctattataagagggtgaagttctgtctgtgtgatcactgtactgaaggttcagaggaattgcagagatacaagagtaattatagctctgacagtcgaagttctgttgattcgttactgaacggagccggcgaaaagttggttccaacggtttcttgggacacagtacctatcgagggtgtatctaacgaggaatcagggtacgacagcgatcctcataatttggattacgctctggatcgattttacgatagtgatgattcacatgacgatatacgccatggccggggatcatcaaggactcacttgggaatcaccccaacccttacagacagagtacgtggatcctcgcctatgagaccgaggcaaaacaatgatttcacatttcagcttgatgttggaggcagtagcaataatccaaagattttctttggccctaacggggaaatcagaagaagggactaccccagcagacctgttttatttaataacgcgttgatcaggacacagtaccataaggattggaagcatgagtggagacagcgagtagaaaaaatggaggagagaaaagagaccggcgtcagtacgtacttcaaatttcctgagattctatttccgaaagtgaaagtcgatttaacagatgcccctttggtcaacgacaatggggaaatgatacaaaaggaaagaagggctagcatcaaaagacatttgaaagttgttcgaacccctgttggattggtaaagacgccaagaactatccttgtgcatataagtggtagagaacatacatgggttgcactagattgggctatggccgaattggctgaggacattgattatatagttattattgcaaatattcccagaagagattggtcgactagaagtggttcttatacgagatcgaggtcagcatcgagatctcgctctcgttctagatctaggatgagatctgtctctcggactcgggaattcggtaccgatgatgatcaacctgatgctacttggtgtgacggttgcacggttggggaagtaaatgacttgcttcagcggctcatcgaatattctactttgatcatgggtggtaagaagctcaaaataacagttgaaattgtgatcggttcgacttcgcaaatattgattgattcattaaatgcgtacgctccagatttttttgtcatcggcagttctattgataaatatggctcgggatcagttgttgtgcataagtcaagacatttggctccggtgctgatgcagtatttccctattcccgttttttttgtggctgcaaggaggatgggatggttcgaaaagaagttgcagcgagatattctattcaaacaacgagtcttaccgtcagataaggacactgatctggatgtctcatcattcagtgtttccacaacggaaactgatgacactgaaaacgaagacaccgatgatgatgatgatgtggagacaacatcaaatttgtctttaggcaacagagaaaaaactgtaaagcaaattcaaaagctaagacacaattaccgttgtcttgttgacaaaaagcttaaattattggatgaagatacgggacttccaacacctgaacaatattatgggaaaatggattctatcattaatgctactttgaacttcaacaaagagctcgaaacctggggtgactctgccgatatggctgagatcaaaagaagtataacaggtggtgtacggcccagagtcatgaagaagaaatctatgcttgatttctcggatcttcctcccaagagaaaatcaaaaattccaactgaacatgagaactcaaaggaaacaatggacttcaatcaaaatactttcaagaataaaaaattacccaaagttgtgttaagctcacctcctccatcccgaccagtatccccactcgctaacaatggagagggaggtatcaagtttgctaactcagtgaaatcaaaggatggaaagggagctattcagcgcatcaagtcttatgatccatattcgcagaattctgatccatttgatagagaagattctgcgctatcattgagcgtggtaagatctcatcaacccaagtcggattcaacttcgttgaggaaagtattgagtacaacttctctagataagaaagagtcgaaaaaaggtagacttctttcatttttatttgggggaggctccaataacaacattggttctaatagctcaaattcaagtccagtggtcagcgaaagcaactcaaggagaggtagtattgccagtcaatcttcaagtgattcgactaaaaaaaggagaagcatatttggtttaaaaaaatagctcccaaattgaattactaaaaccctttaacagctagactgttattctaactcattctatttttcatttagttcttagaggataatcatgtatataaagtaatcgaaattgcccgttaggcctactattaactgccagttacacaatttaattttaatgtcacatttaagacttgaagttagcttgcaaacgaaaattataagacaggaactgcaacttcgtcagattttgtatcgttcgagagttccagagcgacaatttaaaacgatacagcctatattaatctgatcctatgctgatatttacgtatccagccaaaattattttggtgacgtttgaactgaagataggccactggtgtttgtcatttaacatccctgttttaacgtgttttcacataatatgatttaaaagaaaatgaaaacgcgaaacaagtagtcgtcatcggaagcaatgagaagcaagaaaccacaagctcaaaatgtcatcaagacctgatctaaagttttctgatattgcagaggagcgaggattctacaagaggtttttacaacttcctcaaaggagtcagaatactattagattagttgacaaatccgattattacattgtggttggtgatgatgcgttatttgtggcagatcaagtataccatacatcatcagtattgaaagattgcaagatcgatcctagcacacttcgccaatttgatttacaggaaccattgaaatatgtgaccatgtctattcaaatagtgggcaatcttttgaagacatcactattggaactaggcaaaaagatcgaaatctacgatagaaactggaaacttttgaaaacagcttcaccaggtaacctcgaacaagtagatgatttaatagtagggtcagtggaaacgaacatcgttttagcaagtttgaaattaaattttaatggtactgctgcatcaaattattgcacaattggtgtttcatttgttgacaacacgaactacagaattgggttatttgatctactagacaacgaggttttctctaacttagaaagttgtttaattcaacttggtataaaggaatgtctaattccagatttgcgtgataatcctagtatggcaaatgatttaaagaagatattgagcgtcattgatcgctgttcttgtgtcgcatcctttgttaagcctagcgactttaacggaaaagacgttgaagccgatttagcaaagctttgcggtgatgaattatccttatcagtgtcaaagttttctgcaaactgtctaggtgcatgtagtgtcttattgaactacctaaacataatgaataacgaggccaacgttggaaactttgaagttgtggatcactctctttcgcaatttgtaaagttagatgcttctgcaatcaaagcactaaatgtgttccccacaggctcacagggtaatactgctcttttaagcgtcggctctcctcaaaaatgttcaagtcttttccagttgttgaatagatgtaaaactaattccggcgtaaggttgttgaacgagtggctgaagcaacccttgaccgacatcgaccagattaccaaaaggcatgatctagttgaatttttcatggatcagttagaattaagatcttctctacaagaagaatgcttacctagtgttccagatatccgcagactaacaaagaaacttcaaaaaaatgggaacttagaagatgttctcaagatttatcagtttgcacaaatggttccagttatttcagatctgttgaaacagaagaccgaagaggttgattctaatgatttaatgatactcgtgaaagaggttttactcgatccaatgttagaaaatgcaaatcctcttgagaaattgaaagagttggtagagaccactgttgatctagaagcttacgaggaaacaaatgaattcatgatcaaagtcgaatttaatgaacaattatctatcattagaactcatcttgatgaattaaaagatgctataagaacaatacacttagacactgctgatgatttgggcttcgatccagaaaagaaattgaaactagaaaaccaccatttacatggatggtgtatgcgattaacacgtaatgatgcaaaggccctacgtcaacataagaaatacattgagttgtccactgtaaaggctggtatattcttttcaacaaaagaactaaaaaatattgccgaagagacctcagaactacaaaaaaaatatgaacaacagcaagcatcgttagtcaaagaaattgtttcgattactctaagctatacaccggttttagagaagctttctgttgtaactgctcaactagacattctttgttcattcgcgcaagtatcttcatatgcgccaattccctatgttcgtccgaagatgtatccattgaacgatcaaaacagaacaacagaacttatagcatctcgccatcccattgtagagatgcaagacgatgttaccttcatttcaaatgatgtaaaattagtacagggtgattctgaattcatagtcattactggtcctaatatgggtggtaaatccacttacatcaggcagattggtgtaatatgtctaatggctcaaattggatgctttgttccatgcgacgaggcaaaaattgctgctgttgatgccatactatgccgtgttggagctggtgattctcaattgaagggtgtctccaccttcatgatggaaatgttagaaacagcgtcaatattgaagaatgccactcacaactcactagttatcgttgatgaattaggacgtggtacaagcacatatgatggttttggactagcatggtctatttccgaacacattgccaccaacatcaattgtttcacattgtttgctacacatttccatgaactcacgacgttggctgacaagctagacaatgtttctaacatgcacgtcgttgctcatatcgaggataatggatctcataattctgatgatataacgctactatacaaagtcgaggctggtagttcagaccagtccttcggtatacatgtcgccgaagtggtccaattcccaagcaaaattgttaatatggccaaacgtaaggctgccgaattagaagatttgaagaaagataatgattctctcaaaaaggcaaagctttcacctgaggatatagtgctgggaacagaatcactcaagaagtcgttaaaagtctggtgcaaagagttgaaaaagaataaccttattgataggctagatgacccgtccgtacaagaagaatgtgtcgataaattaaaacagcaaattgacaatttggcacgagaagaagatacgacatctctgtttgtagattgggttcgtgacacactattatgatggcctgtttgtaacacttattagtaagtacagacaattaaatagcaaccaaaagtactttttgccgtgatcgtgtctgcgtctggaagttgtgttataattaggggttttaaagggagcagcagcacacacgagctattaaggtgtttttgagatatgcgccgcagcggatatcgttaccagatacttaaccgcacgccctccgctcaatgtcccagtttccctctttttcatttttttggttgtactttcagtgtttgctgagagcaatgaaatatcggtattatataataaatcatcagtatgttagcaaaggacattggtaaaataccggtatacaatattgttcgtaacggagaaacaaaaaatatttgcaatactcaattctgcgggtgttaaatattgcagatagtggaagataaatcagccaacgcaccaagcagaactttgaatgtataaatatctgctattacgggcggtgttgtcctttccattttcctgatgctgcccaattacccatcttcttggtcattgaatagatataagtaacatctaaaatctaaccgtcaaatcaggctcatcaacaatgttacatccactatccactgaaatttactttaccttcaacaatggaaacaaggtccctgcttttggactaggtactgcagctcaacatgagagggttgcggaaaccaaacaagcagtcaaagcagcaatcaaagcaggttacaggcacattgacactgcatgggcatatggtgttgaagaatacgttggtgaggctttacaagagctattcgaggaacgtgtcgttaaaagagaagatttgcacattaccagcaaagtttggcatactatgtggaatgacgttgataagtccttgaacgaatcactcgcaagattgaaggtagattatgttgacttatttctacaacattggccattatgcacgcaaaaggtgccagatccgcatggtgttgataaaatagctaaggaacctgttgatgatcaaggcaatcccctatacgatgaaaagggtgattggattgaaacttacaagcagatcgagaagatttacttggataagaatgataaaagagtgcgtgccattggtgtaagtaacttcccaattgaatacttgaagagggtcttgaaggagtgtagaacagttcccgcatgcaatcaagttgaactacaccctcaccttcctcaacgtgaactatgtgagttctgtagtgaacacaaaatcttagtgactgcctattcaccattgggagggaatggtgctcctttactagaacttccaatcctaaaggggttatgtgagaagtacaatgcctctcctaatgatatcttgacatcttaccatctaagacaaggcactattgttattcctaggtcattaaattcaacaaggattgccagcaatttagaatttgttccactttcagaagaagatgtgaataagttgaatgaatttggtcagaagaataagaagagatatatcaatggcgcagtcagttcggtgattccaggtttcaaggaagattttctcaaagagcagctgcagcagtcttaaatctctaaccgccgtatggtgtcgttgaacatcgtaataagagctctcagagccacctatattcggttatatattactaaaaaaacctatttttatgggaagcgatataactattctatactttgtagctatggcttacctatttaatgaacttatgtcctcgaataaagttgttggatgaacatagctagcatcagaattgtttctaccacttgaattcataaatgattcctgactgagaaacctcatatcaggtggaaaccacctttcattaaagttaaatcccaagtcgtagttcctagagttagtcaaattgtttttgccgtcagagttttttgcattttccaggataccttttggcatcttggcagtatcttcttgtttagttacttgcttttgagactctttatcccaccatgatcggagcatctcttcagtagagtcgtctgccaggccgaatggtttcaatagagcccaagtaggcatctttccggcattagaagatatactcgattccttgcttaatgatgatctttctttattgaaaactgcagtaattttttcagtttctttaccaatggtaacagaaatctccttcataaccaattgataacggtcactatccaaaggatacgtgcaagctagggcatttttgtttttataatgcatggtgcccatttctaattggaatgataaaaggaaaattgatacgagccatttaatattttgttgaaggtgaagctctgttatagaagtgccattcgtcactctataataaagatcttttaacatacaaagcaattcaaaagcggcagatgaatcaacattattgatcacatagaatgatgctgataagacaactagtagtaaatcaaagaagacatgctgcttgtgaagaagaatggtgtagtctttgaaatcgatagctttagatgctttcaaggttgctttaaatgaatgtaatttgttgacctcaaagtattttgataactcttcacaatctggtctgagcccaccaccaacaatatcccaattatcatcaaagaatgctcgtgtgaagttggcgagaataatgaataaagtctctctttttatatttatttcagtcattagaacactcattaatttgaagttcgcaattttctgactttctgctagttcatgatatattctggccaaaaaggttctttgattatcaagccttaagtaaagaggaatgttgtttgagtatgtaatcaaatcatctttgatttcattgatcttcgcaacaatttcatcaaatgtcataacacttgtaacgtccacagaaaataggtatctagtgatcttgtttgaaattttgcataaacacgctctaaagtagtttaaaatgacaggaaaataccatgggtttattttcacccaaccaactaccatcgattcatctttcatggcatccacaacattggcatcaggagagcgacttatagggcattccgctttcaaagttttaaaatagtttctcccgaatgatactgacatatcagattcatcaataattggaggtttccccaatgtcatcgatagatttgagtcatttaagtaacaatagagccatatcgatcttatttgtaagaaatcttctcttggcaggtgattaaagttatccaagtagcaaagttcaagatctcttgcaaatttcacagctacaacgaaaatgttcaatgcagcttccgttgaaacgcaggatctgatatacgagtagagtagtaagagagcttgaactgaaagaaggccctcacatactaaagaaattttatggtagtagaaaagactgttttgataacagtcattttcaatttggaaaagcttttccggagtaaaatcaagcttatcctttctataatggttagattccattaaagaatgtctagcatacaacgaacctaaggatagcagaatgttgacaatcaaatgttccgaatatgatatttcttcagctttggaagaaaaatacttctcaaaaattttctgacatgcctttggttcaatgacattcaagtcctctgccgataataggctatagtaagtctccataattctttgacacctaatcgagtccggaattggaagcaattgagattcgtcggatatattttttaccaaacgtttcatttgaatgaaataccatcttgaaaccatagctttcacaggaactaaaggtcgcaggtattcatccttgctaatctctggacaaacttttgttctaagccatagtaatgtggattcggtatattggcacgagttatatctttttggagttgcatgaacttcgctgttcctgcctttggcctcttcagttttaagcgattgttcagacttatttatgaagagttcgcattgtcttccaatccaatccaatctagtgcaataatccattagcaaagtcattttccttcctagaatatcaattttattatccaagacggatagttgtccctgagtgaccatcccttccaaagaagaattacctacgggatcattatgatgatcacgatgcttttgaggatttgtaatattttgagtcgcattagtagttgctttttgctgctgattttgtcgatcatgttcggtgttatctcgctgttgatttcgttgtcgtggaagctgttgcaatggctgatttaaagagtgattcactggtgggggaacaactggatgctggtgctgcgaaagaggctgtggttggtattgattatgctgtggcagaagaacagagttctggacaatagaaacagggatcatgtcaatatgacctggttgagaagtataaccatttgtgggcgtgttgttaaatggcaaaggagtctggtagatggaattcaccggcacagagttgggataatgaacgaacactgagttttgttcgagtgaaggagaagaagtagaagtttgatcgtttgaatttgataaaagattattcggcaggacagcttcgcttagattattattagtcatagggacagttgagaggttctcgatcatagtgtttctctgaattccgttagaattagccttctgtttgagacttataggattgactattattccgggattgtatgcattgctagcattagacgtagacggtgtacttttgttattatgattattattttcgctgttagtatcatttttagtgtcaatctggctactgttattattgtccgtatcgacactcccattggcattagtgctattattctgattattattactattagtattatcattattatcattattggtaatactgtgtaattcgcttttagtagtatcggaactgaatttcgtgattctgcttttggctttggaattcgtcctgcgtatcatttcttcatggtaatggaaggtgcatggaactttatatttgatacagttcgaacatttcccagatacagggtctaagtcatcacatttgatcttccgtcttcgacacctgtcacaggccttcgaaacccttttcttggcgggtttggtggtgacgccctcggcatgagaagttatagctggaataccagcatcctcagtaatgctacggatcatagtttctgaagagaaatgtgtgatttacaccggtttcctcacacctttattgaagttataactgcaatatgatatctgagtagcaattacaagttctctgtaatcgtggaaagtgaaaatggaggaagtactgaatctttcttacacttcaatatagtaataatattcgattttcctttagaaagtctggaagaaaaactcttgcgggctgtaaaatgacctaaaaaagcagataatttaaaccagaaacactctgtcaatctgaaagagttctctccttctcaatatatccccaaaaagacaaaacgaatatagtatatccagattctcaactctgtcttattgatttcctaagagataggtttgaagtgttgatataaacggataataaatcagtacataaatatttcacgacgttcacgattgacggacgattcacagagttgggctgagtgaaaaaggtagcaagataaaaaagaaaacaatcggcaaaaatgctccactagaaaatcagagggggtttccacaggaagtaacacaacaggacgggatagaaaaacacctacagtagtgaggggataggagggattcgaagcgttatgaagcgaactggcctagagacggaaatgcaagggaaaagttttcttgtggtttcccttttgttgccgtgtctttttcttcaagcgcaaggttcatgcaataaacaatgaacaatagagaatgagtaaggaatttttatacacattgttaaagctactactgttaactggatgatatcttaaatattttctgattgctatgctaccagaagtaagttaggattcaaaaatggataactacctcaaaagaaaaaaagaacaaaccatttatctgagctttgaccctgataacgcagggaccgaccgtttaagtctgcttattcattcttggtttcgaaccatttttctggctctattaaataagaaaaatgggatggaacatcgtgaaaagcgttcaatccacctacagtaacccaggacagtggtaattgggaaagtacttacaggttgcgtaattaacaatggggcgatatccctcttgcactctttttacagcgatatagtagaacattttcttgttcttctctgcgtctgtttgcttacgaaacgcgaaggcaatttgttccgagttgggaaaatagaaataaaaaaaaaagaaaacaatggttcaatcctttcccagtttccccgccagtaccgcgtgaagagaacgaaatatgtagaaacaagtcacgtgaccaagtagatattcggtggggaaatccaagcgatatatagatgcactgagcaattttatctcagttgacttgggccatgaggatggagccatcaatgttttcgggtaaaaatagaagtcccgtggacactattgcaatctcaccgtcttattccgatgcagatctctcaaataggtcaaatgcttcttaagtgcaaataacttttgtagaaagaagtcgtcgcatttcctcccagcttagtccgctcctaacgtacggtaacgtcttgttgctgctttatcggtttttctgtttatccgcgtttagaatatggacacggggttcaggttgttccgctagcggatataactcggccggtggtatccaacacttcttccgggtaagaaattactagtggaaaaatacttggctaactcatagaaccgctgatgaaaggataagcgacaaaccagagtctcgacatcatgaggttctgtgcaacgtttctctctgtctttgatcccaattttatcttctctcacattaccaaatctgggtcactattgttgcagtaaaatgaaagacatctttaatgtgtaaaatatactgccagcagcgggtttgatttggtatattagatatataaatatatgtattatataacgatcattggtttgtgaactgattttatagacatgataacttttgtctataataacgtaaaggtgaatagaaactgtatttgtgcacctttgtggcccagattatcagctggtaaagagcttcggtgcccattgttcagttgccccgctcttctaagactaggaagttatgggattaattaagcttttgaaagggttttcattgcagagcgaagcggattcttctgctactgtagagaagatcaaggaggctattgatgtttgtgattcaagtgagtgcactggtgattgtgtcaatgaagacgcagatgaaaaagatgcattacaaaaagatgagggaatctttgcgaagttgaaaattgaccatgaacaacctttgtatggatcttcaacgacttctaaaatacattttatcattccgacatctcaaactgattgggcgcatgatgcttgtatggaaaagccaggatccgttcaagctgtgatgcaaaaatggatcaatgctaatagtgacaagtactctgatattgaaagtgaaggtgagaccattcgttgttcagtatcatctctaccgattgatttgttggatattgatgtcatgaagaatacaaagaatgatgttcttatctttccgcatttcttaaagataaaagcagtgaaatcagatcttgttgctgagcttcttaatgaagttgtaccattacttttgaagaatgaacgtggaacactactagcgaaagattacattgaagaaattaaagacaactcgttcatccttttatgttctcatagaactagagataagagatgtggtatcacagctcctattctagaaaaacactttaacaaacatctacaacgccatcatctttacagagataactcagacttcagacctggtggttgtcgtgtggcttatgttaatcatgtcggtggccacaaatttgctgcgaatgttatcatctatttgaagaagacccatcaattaatatggttaggaagagtaactccgttgcacgcagaaccactaattgagtgcctaattgtaccgaacgaaccaaaattgccataccccgaaaaagttcgttgcgtggctaagtataaattttgattcgtctccaaagcatacactattcacctaagtgtattggaaattttttctagcagcaggagatgtatcgtcgatggcataagactccattcttaaatttcactgatctgctagttcggtttcgtccagcacttatatatttatatagaaaagaatagaaaccattctttaagtctctcattcgtgtaaaaaagttgcacattcttgccatatttatcacggaacaggaatgtgatgatgcttaacttctataactcatcttgctctaatggctcttcattattaagttcagatattttgttcaagatcatatatctcagcattaaatcctttggaacatctttgagatccttcatctcattttcaatatcggctatcttctcagcgcaatttgtttcatcgttcatcttaaggaaatattctctgccatcttcgcataattcgtctttatccgagcagttatcattcacaatcagttgtaatacacgatcccactggtctgaagttaccactgcttgcacaaacctttcaaatacatccaaattccttctaccattgaacgttacaatcctgtcggtatccaaagtccacgtcagatcataacccgcgttggtaattgtatcaagtaaacgatcaatccagcctctagggtcttccagacgcgtcacatttagttcggatctcaatggtttgataatttctaccgctggaaatccgtccaagcgtttacatagcatgttaccaaataattcacaatcaacctcaaagaaggcaaaattaatacctgatgttaaggcaggatcaacaatatcaacttccgacaaaacggagctttcactcaactgttcgaacaccggctttagtttcttacaatgtgagcaccaattggtataatatttaaccactgtgtacgtagggttggtagcattgaaattgttgacaactccataaaactggtctaacgacgtcacggattcaactattgcgagggcaacggttgcaatcagagatagacataagaggatcttcatacttgagttttagaagaattccatatggtttggttgtatctagtagggaattcgaaccatcatctaagaagccctttatttgattgaaccacttcttcaaatcaaggtattttatttaatcttttttttttttatggaagttgtatttctaagcacgagttaattagaaagtgtgaatgggtatatgtttatatacttagattctcttatccaaaatagttctggcacaaaacatgtagtatgttgaacgtgagatacacatgagcaatgcacaagtgaaagatgtgaaacactatttattaagatgcagagtcatgtctagaaatcgtatataaaatgtctataatgtaaaaagccctgttctcttcttaccgaatgggtatataaataatgttgatgcaaataatccgacagagataccaattgaaacttgaatcatcgtgacaccgaaagacatggatccagaaagatcgtcttgaacgacagtagtagtactattgttcacgatggcattggcactttgtacacctgctaatagagagctttgagatgcaacaccacttggcacttgaacgaagatagctggcaacatggcagaaacagcaaaccctttccagattcttgagtataagttacctaatataccaataacgaacgccgccatagcagatgtgaattctgttgaatttgcaaaatgcttaccagaaaagtacgtcacaacataaccacaacatgagatgagtgtcatgacaggcaactgcgtccacctagcttggttaatcaaacccaaaccgattgaaaagcaaggaacaaagatgaatctaaaccatggggaaatgttctttgaacacgaggtttcgttggtggcatcatggtagatccaaccaaacaatgcagctcccaatgtaataccaaaacctaaaaataaggagtagatgatggcgtagaacattctgacagcaccggcaaccaaatttctactttgaagttccaacgaaccacataaaatgatataaccaggcaaaattaaagccaatgaaccttgaacagtggcaccgaaacaaatattggagtttggaatagaacccaacgctctaccgcaaaaactgacgacaatggaggcagtcacttcaaacacattggagtaaagatttgatttttgggatacaatgaactgcaaggaaccaacacaaagcccgataccaaacgcgactgccatattaatccaatctccaccgaatgcaaatggtgtaaccattgacgagcagaatgcatacaacagaactgagacccatggtggatacaaattcttaccagtcagaattctgtcaatttccatattggcatcctcaacgctcataatatcatgaacaacttgtttataaactgaatggacaccatgtaatttccataagttaagaccttgattgcatcttaccaattgcacttcagatgttctggtagtcatatcaccgaaagaaatgatcatacacccaggcacataaaggaattgaccgtcaatctctaagacacgagaggtcattaccatatactcttccaatctatgggtaggggcaccgtacaacatcaatgctttacagagacgtagaataaatctttgcctttgcaacaagtccgcaatatgaacggtgattctggcttcagctgcagcctttttcttgaagtttttggctttcactaagttcttagcggccgctttgggtctagtagctttaaaatttggtaaattcatagaagaaccagatttgttagcgccagaaacgttagtttgagatttactatgcttatgaaatggattgtaaatctttttccccgttttttgatcggattttccagcttgatccacaggctctggggtttgttctatcgaggaatcatttaaggagagctgagactttgtgtactgatcgtcttgattttggtatagttttagtaaggatcccaaaacaccacctctaactctatctactggtgcaatgtaggagccttcaatccctaaaggctccagatcatcaggatcatctatatcatcgtagtggttggttgcaggaacatagaaagcatcatcttggtgagaagataccatagtctccccgtccgttgactgattaaatggtgatacaggttcaaaaggagaggtaacacccgcttctgttccgagattgtgttctccattgggatgttctgatgatgcacttccagaggctccatgttgtgtaccaggtgctgacttaccagccatcatagaatgtgcttgaactatctgctgggcggtagccgcgatatctgacattggaatagggtcttcaagattgttctggcctgcattacgttcatgatcattttctcccgatgggtcagtgttattgacagctggagtcaatccacctcctgttaagcttaagaacttggaaaggaatccgccatcttccacttcgtcatcagctccattcaaattcctcattccaccttttgaatgagattcagcggaatttcgaccatcattagtttcttgatgtgggcgagcagttgatcttctcctgaatagatgtctaaaatgatccatcttactttcagaagactgggtggaaactgaatcatcctgatcctctttttcagcatccttctcctcatagtattctccaccgtcttgagttgcggtatcttcaggaatgatacttgggtgtgatttgaactgaagtttcttcgtaactcctgatgttcttggtgaaatatcagctggattctcaccagaatctttttgctcttgatgttcttcctcctcctcatcatcatcatcgaaacacctggcagctcctgaattatctctgatggtagctatcgcatcatcttcgatcatctgttgtctacgattgccagactctgtattggatgcagttctgggtgaatatcttgcgtcagaggaaccgacgtttgtcctgtttgccctgtttaattcatctgtggaccctccggagggtctaaaactgggtaaattcagctgagagctagacacgtaattcgaacttggtcctgcttcatcctcacttgaacttgagtcgtcagctcttctctcagatctattcgaaggctgctgtggcttcttacggagtaaattgaatccaaacttttcatgattgttcttgtcaccattgtttccataggatgacgacattacggattgttctgtattatttctgggatttcactcgtcaattctattgcatttgaccgctgctgagacggatacaccataaaatgggagagtataaatcaattttgatcttaaagatcccttctatatatatatatatgtattaatatatgatacataattccacacatttaacaatatttttattactatgtcattgaagaatgtgaggactgtacagattacgtacggcttttgcttcaaaagattatgaatttataattggaaaaaaaaaaacgttgaagattcatactctattcgaaccatctacggttactttattggctgtgcaaccataaagaaactacaatcaaaaaaatcaagatgagatgaggagccggatcagggcagatgaaccatgaaccgatccagcaactaaattgcatcaacacaggcgccaaaaaatatatattaatctattctattgtctaacttctacttatgcttgcggtaatcgaaatcacacactaacacccaggctgcagtcgttgaaaggatcaaatgacgttaacgttactgacttttgaattattatctcctttaagtatttccggtttgtagctgtctctggttgctaccagcctattctcactgagcgttgctgtcagtcgagattttttaattgttttgcaattgatttcttttccgcagtgtaatcgtttcagtggtaacatagaagaagctgagagtacactatgatttgctttttccgcaatgtcgttttttttttcttttcgttttttttttcgtgtaaccactcatgacgtaaggaacaagaatcactatgaaacagggaagaaaagcgtggacattagttacagatgccagggacgtcgagtgtcaaaggagccaaagtttacacaaggtataaatagaaactccattaaaagacgttatgtgatctagtcacgtgactacaagaccccttcacaaatcaaaacttaaatcaccatacttcgtatgctttgtgctgaatgggccatacatagcaaattgactactggtggaagaaggtgcatagctgaaaactgctgaaatgagactataggtaaatggaatatagtgaaagcttgacattacgaggctggacatcccgatatcaattaatagacctttactcttttgggaaagggagaaaattgaataggtttagtggcaatggcggttaaaatccctaaatgaaggtagggaaggaggcttatcttgcagacaagaaaatacattgtagagcagggaaacttaatacattttttgctccttcggattcagatgcccaaataagtctggaaagatgacatatcactttaaaataccatatcgatacgtaactgtgcattcttttataggttactatcgtgtatagtagttttatagatcatggttctccattatgttggtacggagaagcagtgagtaacttaaggaagtaatttgtcatgcgcgatgcatcgatcttccagcatttttgtgctttaagttcattagttagcctgtaaatcaaattcttagtgtattaatccagaggaatcttctcactttgcaggttacggaagagaagttcattcattgtgagcacctcgactaggattaaacggtgaatccaaaggtgatttgcaacagaatcctaatttaccgatgcatagcagtcatgcgtcgtccaataattaacatattgtcgtacttcatccaatttacacataaatgattcatttactgccataaggggggcagggcgtttctactgaagctattaaaggaaattcggtattatctatatcggtaagtttagccgccatattttcttgaaaaattttcctttcagttgttgtagccaaactgtggggaagggagaactatggtcagaagcgatcgcaatgtttaccactcacatcatgacgtgcaataggtgcgccatattgggtcatatataaattactagtatacttaaatttttgtcggtacttcttagcagaatctctagtgggccccaatcttttcggcgcttacactgcagaattcggcaaatgctgcattttcggtaaatgtgcctgtacttaacccctttatatccaaattattcgattgatctattaatacataggttagtatgtacatatcttccgctcccatcctgtcccgtttaattcccgtagccaatcttgccgaacctttcttccccttaatctaactctctagaagttgttcgtgcccggtaatatttggaggggtacaatccgatcattttaaagtatatggagaatcaattaataaattagatttttaatggtttgtatattgagtttcccttatcgtagactcacccctcccctataccgctatacatggatttatcgccttgtacaggaacacttatcagcttgtagatctggatttttttttttattgctgaaaagaagaatacatcctttgcaccagaattaggcgccgacatgttggaattcttttgtggaatatataaaggatgcgttattcaaaggatctcctttaattttgaatctttttgtgttctcatcttctaattaccgtattgctgtcagttatgtgtatctttttaagttatgtatcaattgtgaacgaaggaaaccacatgcatatttgcagcagaaggaacaaatttcacacttacttttactaggatcgatagtggctaactgaagctcctgttgttctgttttgaagttttacattgaaaaagtgttttagtatataacaactagacacagcatcgccttttcactttttgagatcaaaggtattatcgttgtttgagtttcattttgaaactgcatattaagagagtgttaatatatcaggattattgtttttctgtttttctatttttctcgattctatcctatacagcattatctaaggtgtcagatttcagagatttcagacattcgataaattttttttttctaaaaaagttagaataaagagagcggtacaaaaaggcaaaaacggcactcagaagacacaaaacgaaacactccaataggtgtcagttttaggaatcctgtaataaaagccgacacaaaaaaagcataagattagttataaaatcaaccaaaaaaaaagtgcttctaatttattaccgcgtaattgaatcttaaaacacaagattaatcgttacattttaaaataaaattcactagaatatttgtcaatcaactacttcaataaagcaaagaagaacaaaatgccagctttaactttgaccacagcagattccttcatacccccagatgttaataaccctccattctatattccgctcaagaatatcgatgctagatataacgtaattcaggaattggggaaaggatccttcggatctgtgacattggccgagacaatgtacgatatgaacagttcagccacccaaatttcctcaatgtacccagaaactttgatggatcaaactcttatcagaaacgtcgaacaagaaaactggtactataagaaaaagggtatagtggcaatcaaaacaatgatgaatagattaccaacattgcatgactatacaagagtcagagagatcaaattcatattgcaaattcctgcacacaaaaatttggttaccatatacgagatgttcattgatgattctttgtatcaccttcacattgtaatggaatgcatggagcagaacatttatcaattgatgaaacataggaaaagaagagtgttttccctacctactttgaggtcgatattattccaaatattagcaggaattaaacatattcatgatcacgattttttccatagagatatcaaaccggagaatatcttgatatcgccatctcataggtacttcagcaagaaatggttggaagatgataattattcggataattacgtggtgaaattggctgattacggtttggcaagacatgtgaataacagatcaccttataccacctatgtgtcgacccgttggtataggtcaccagaaattcttcttagaaaaggatactattccaaaccgttggatatttgggcgtatggttgtgttgttgtcgaactagccaccttttcaccactatttcccggttctgacgaaaccgatcaaatatggaggattctagatttattgggctccccagatcattctatcaatggaaaggagcactttgggggttcatggctggattcaaaaccattataccaagctttgaactatgaattcccatacgtagaagggaaaacgataagggatgttctaccaaacccacaattggaagatctatatgatgtggttacatcttgcctaaagtggaatccaagtgaaagggctactgcaaacgaaatatgtgcattgccatacttcaaggaatacgtgatgagagaagcatctttggcaaagacaaataacggaaccgcatccaaaaataaggataatacagctttggcaaataaacttgcagcaaatccatcaatatcaaaccaatggagtcgtattctttctggactaccacataacccggaattgggcattgttcctagttttaactctccacagaagttaccaaaggttcaaaagaacaatcaaatgaattgtgtaacagataaaagccaacagcaaccgcgaagaggaggagttgcctcatggttcaaattttccacgcagaaaaaccacgttaacatcaatccaaatacaaacaatgatgagaaaatccttactagtgttaacacgaatacaaatagccagaagaatcaaggaattgtagaaaaaaaacagcaggaacaacaggtaaatgctcacaacgagaggctagatagctctacaaacgctaatggtaacagtattcctgatataaatctcataggacatgccaacaatgataatgaggtattcactattgagctggatgatagcatggagactatgacaggatctgatcaaatttctaaggaattaaatgacaaaatagagctttatcaagacaccacaaatcagatgaacccaccaactctggatgttgatgacgatgacgatgaacatgattcgattgacatggaccatgagaattataggattcaggtgttggacgaatttgatactgatgagaacttggaacatgaaattagagcgaccgacaaagatgaaaacaatgaagttgccgttgataagatgaagatctccaatcaaggagaagacgaagatgatgcagatagtcttctaaactattatcaggatatgatggctaagaaattaccacttaacaaaaacaaaggtaattacatgcattcgaatggaccagcgggtcctacactatcagatcaaatggcaatagacgattcacttgatctacaagaacagatcccaagaaatctgctggagagggcagtacagcaaagagttttagattgtcttttagatccatcggaacatgcatctcaaaacctgattcaaacctctaactcccacaatcatacattccaagatggattaagtttctgatcgtagaacaaagaacagcaggctgttcctctctttcagttctactcgttgaaatttctttcaacaacgctttacctggtcctcttcccattcatttataccgtttataatatccacacacacacacacacatattcaccttttgtacctgctagctcataagttttaacataacttgcttctattatttcctttataacttgttggatacaggacagaaatgccgacaactctttcactctataacatggtacttctacttgatttacctcttatgtacactattatccttactgtctttgtttactatctcaagttttttttttttttcttggtaaactgttcctatcagctccgaggtccgatgattcaaaatctttcgagccatcaactttacattgtacttcaaagtctttataaagaagaacttcggttaagaaagaacatagataatatattcaactatacagctttcctcacattagacaggcagcgaaccggaaatgtccaattatgatgttgtcattgttggcgcgggtatatttggattaagtactgctgtgcaattggctcgttccaaatataaagttgtggtggttgataagtttcaaattccatcgcagttaagtgcgtcctgtgattataataaaattgttagactagagtacaacgatgaagtctacgctgcactagcagtggaagcaatgggatactggcacggtgaaagtgacaaatttttgcctcgaggaatgctgcatgattgttactctcattgtggtagattgagtgcaattcaagataagaatacaagcagatatgctttcgataatgacagtttacaacttctacaaacaaagtttaataagtgtaaaactgtggaactacataaagagttaacttgtggtggtaagttccctcagttttctcatagtcaacgctacgatgagattcgttacaatccagactgtggtattggtttggctagggattcactagtgaccatgaaaaattatgctgaatcattaggcgtcgtatttcatgaaaatgatggagccgtgagtgtgtcagcgggcactgttcaatgtgaatctggcagaaaattccttggacacaaaattattgttgcatgtggtgctaatactgtatcacttctgcctatgtatggtcagatcagggctactgggttatatgtaggccatattcaactgacggacaaagaatatcaaaagttaaaggatattccagtggtcttcaacagtagcttaggatatctgttccctccagataagcacaccaggatattgaagatttgcactagtgcgatgtctgcatatgatgatatgagcaacaaatcaagagcggtctatcgggccctacagcccgatgcggcacccagtgtaccaatagaggcagtcgtgcgtataagaacagtactaggtaaatatctaccggatctagtcttcgataccaaaagaaagtcaaagttaagggatatcattgattgtaagatatgctggatcagtgacacatcaaattctgacttcattatagacatgatccccgacctgaaaaacgtgtatgtatgttgtggagactcgggacatgcttacaagtttcttcctaacatcggaagctacgtacagcagaaaatagaaggaagattagcaccaatactggcacacaagtggaggtacagggaaagtgattggaacggtacggaaatcgaatggagagtagaacccgaaaagaaagcattacaagaaatagaatggtaccaagaaagttacggcaccccaagactgtaacctttccggcaattgatattatgcagcaacagagtaatatattgcatggcaattgtggatctgttggcagtaaaccggtatttaaatataagtaataaagaaaaagaaaaagtatctacagcttggtacatgtagtagtaacacaatcttgcgttcagcgatatgttcacccacagctttgcgttaaacgaaaacggtactgctactaaccgtgcttttgcaccttgtttattgtttacaactcatcggctcttcattattcaaggtacgacatttttcaccgtttaacgacaaaattttgaaaatcaacaacattaactatctttctaaaaattgacaaacgaaggatgaataaacatgttaataaggaacgaaacgaaacgaccagcccagacatattgagtgtctaattagctctcgtcaataaggtactcgcacatatctctttcacgaagtaaccgttggcaaacttgatagaacagctgtacgaggatcagaaagggccgtttaatttttcctgttgggtttgattcagaacgtatagactgttttagctgtgctttctatacttcgatagctcggacaacaagcatactaggccctgaaaacagggatcccttttaagataaagaagggtatataagtatatcaagctgggcaagttaggacatctttattaatattaaggtaccgacttttcattcaatttcaaatattcaaatcaaataccgcaatacaagaaggaaatatacagtaaacgatgacggatggtactatagaacatgctcaggaccagtcgttaatagacgatgcctccactttgttgatgttctctaaaacatcgaattcaaacgtcaactcgagcgatgagggtaaagacgagttaaaagccgatatacatacacacaaaatgacaccaactccttccgctggaactgcaagtcaggtcggaagtcaagctggtagtcacagtgggagcgctggtgatataagtatgcatatgaatcccatgacatcaccgggccctgcatctgtggcacttatcaaagatgatgatgacgatgatcatctaaaaggcagtcccgttgacaatggtattcatcgcagcaactcaaatagcgaaaagacaaagaaaagcgggaataagaagggtatggttgcggctgctgcgttagcacaagcagctacgatgccactacctcttaaacgaaaagcagaaaacgatagaaaacctgctgcgaacaacagcgtgccaatgcctagatcaggtgccgaggaaaaatctccttcaaagcaagcaaagagcgaagataaagtggtggaacaagaagatagtttcaaagaagctgtagaggaacaaaaacttgaaaaatctgaaacggataggttttcttcggttcccgaatcttatgttgttgatccagatgctggtataataacgtgcatctgtggctatgaagatgatgatggatttactatacaatgcgaccattgtttccgttggcaacatgctatatgctatggaattgaacatgaaaaagatgccccagatgactttctgtgcaacatctgcaattctaggtttgtagatgtaaagctagcaaagaagaaacaacaagaaaggatcagaaatgctcagaataagaagcgtagacgcacggcaaatggcaacataaaagaggtgaagacaaaagaggccacgtctggtacgaaagactcacggaatccaggtacttctgaagcgacggaccatcgtatagaaccagaggccattccatccgcagatcctcttacgaacattgttttaataaatgctaaagaagcttatcctacagtgtatctccctttgacttcaaatgattacaaagataaatacgttgaacttttcgtaaaagaccacgctgatgacgactgggttataccttatcataaattaacgttcaaacctattccgattgaaattaaaccatattctgacagtaatcactcaagattgttccctggataccccaagttagctgtatacttgaagcaaggatgtgatgaaggagactacatcgatgaattcttaggagagattgatttccaaaggaaatacttagaagatccaagaaataactatagagtctggggaactgcaaaacctaaagtcattattcatccccactggccgatttatattgatgccaggttaagtggaaatttaacgagatacttgagacgatcatgcaatcccaatgttgaactagtcacaatcaaattgactaattccaataaccaggatgagataaagttcgttcttagagctctaagattcattgataaaggtgaagaacttcacatcaaatgggactgggacctgagacatccaatatggaagttaataaatcataatgagagcatagattccattgaagagccacaaaggtatcttttcatacattccatagacaccattctaggaagttgtgattgtgcctgtggaagtaatagtaaagattgttacttgctgaaaatcaaacgccattctcaatcactctatagatcagtcaaatcaaaaatgaataatcgatacaagcttaacgaaatattacacggaaacaaattgcaaaccaaaaaacagtcatctattctcagtaaattagcgcatgccacaatctcagacgcagcaagggccaatgaatttctacttaaattcaatgccgttaagctaaagatgttagaaccggtctctgacactgtacagaagaagtctttccatacgaacgctgggagtatcagagggaacaaatacagggtttcagtgacggagtccaaaaacagggttgacccccttaaagaaagtctttcattcatttcagatccttctaagttcgatgaatcacagattaaacacccagccgatcttcctattcccatacagacaataagtactgaagataaccctccaactgacaccaccataacaaatataaccgaaactatatcaaaccaaggacaaactagtgtcacttccgattctaatagcattaaaaattcgttgaagcgtggaatagacagcgttcccggcccttcgtctactatccaccaagctcagatgaaaaagaaattatcgtttgctgattataagaaaaaaatcaaacctgcttaacggatgacttccttggtatcgaaaccttcattagcacgcaaacttttttttcagttcgggatgtacctataggtagtcagcggtggtaataaacggggagagtgtacttaacaatttagcctccttctcataaaatgaacttttttttgcgagttatttaggaatttggacggtgggttcgatttgctttatcgatatatgttggaaaactagtctatacttttctattatttatttacattgtttataattaaccaagaactgactacttcttaggtattctctcagaaaagcgtatttgccttagataaatgcttttctcttttgttgagtaagggttgggataaaacatcccaacctttgagaatttcaagttcttcttgcatagttttcttgtattgaaagttttccaaaatgggttccaactcgaatagagctggagtagctttagaggacttcttagaaccagatcttaacccagattttaaaactctaccttgtctccaagaatctgtccaatagatggctgcagcattctcgtttgtcattcctacttgctttttgaggccactcaacaaaatgtcaatgttgttagtaggggttgtagtgtagtgtgtgtagaattgatattttccctgtaggttcaaaagatacaacagaaaatctgcttgaatcacagggtccactagattgtttttaacgcacccacataaactgagtgatagcattctttgcttgctcattgctttggcaggtaaagatattccaggcgtatcatatagaaacaaccctcctttataatcactgattctgatacattcactagtgttcctggtgacacctgcctgatcacctgtcttcgcaaccttcttgggtttgcttccatccgaatgatccaagcctgcatatccagtaaatcttaaactattaacgagtgttgatttcccaacattaggcatgccgccaattagcattctataacccagtggtagtcccacagtcttcttccccggatcatttttctggagaaacttatcatacttccattttaatatatgtaagagatctttagcgccctttttgcttcttccatctatcatgatatattgttcgtccatttccttatgccatttatttaatgatgcaataatagcaggatcgcattgatcagttttggtgtaaactactagtctgtcaactttcttttctaaggacaagtaatcgaatatgaggttcctagtggctattggagcccggctgtctcgaagttcaactagaagattaagctgaggaaggagattttgagctctttgtatagctttcttttgatgtcctttgaagtcacttgttggtatattgaaatctgggaataccattcttggtacaaatgtagactgcagccgtctacctgagtatttgacacattttaccgaaacgttcatatcttccaatacagtaagtttgtgaacaactattacagttaatggagttgtcgttaatgtttatgacaaagaagtaatcagtagtttgtcaactttcttttggtgaatcatgataggtgatcattaaagcttctttcaacatgagaattactttttactgcgttcagaacaagaactttgaaaatactcgatgagctcatgaaaagaggaaaaactcaatcattgtttcagactttgcagcaacgtctagtgaacttagaacctcttgactgtacagcaatgcccttggttttactaactggttttccgagtagcggtaaaacaactgtggccaagaaactcgtcacgttactacaggaaactatcgattccaacgataaactgtcaaactattctgttgtataccattcagatgaaaccttaaacatatctcacgatgattatattgggtcaaatgaagaaagaagggcaagatctaagattatgtctgtggtgaagagagatctttctcgtcagaaagtcgtcattgttgattcgttgaattacataaaaggattccggtatcaattgcactgtgaagtgaaaaacgtgatgacaacgtattgtttgatccacacggtatgcccaatgagcaacttggttgaatggaatgagaaagagactgatttgcataaaccttgggaaagcaattttttgaatgctcttattcaaaggtatgaagaaccaaaccctcaaacaaggtgggattctccattattcactatattgacgtctcaagatgacatcagtaccctatacacagatattagtaaggcaatattcccaaccgtgttcaaaccggcaacgaatgatagagatactgagaagatcctgcaacaattaaagccaaacaatgccacgatattgaaggctgcctctcacactaactctttgcaaatacttgactccgaggccagtagtgtcataaagattataatgaaatatatgcagcaaaatgtggtcagtggtggcacttcaagaataattcttactcctgagaatactgatttaaacgatccaaactgtctttatgtcgatctctcactacaaaattgctccatgcctcaattacaaagaataaaacgtcaatttgttgcaatgaatagattaagaaacttagagcaagatagagtaaaaccgttattcgttgaatatttgaacaaacatttgaatgtctgaattcttcaactcatggcaacacttaaagcgctttgatcgacataatctttcacatgaacacttatctcacattaaaataatgaaggaaatttccttccagaataatatcatatctgtctataaactatttacagctttagtagcttcttaatattggtatgactaccatccacccggtcaagtaacttcgatagtgacgcttttaagtcatcacttatcaccaatttacttctatgaatccataacaaatgaccattatccactatatctgataaaatgactttgtcattcttgtttaataatgattttatgaagaaatcccatacgttactatcgacagcactctcacacaagcattgtttccaaaatttaaacaaagtcggccagttttcactttctaccaaagtcgttattatttcttttatcacgtcatttgttaatgatcttacctcaaattcatttgtgatgagattgacatactcgtaaagtgagttaaggttagtgttttcggtatgcattgacttaactaaaagtttgatgaccctgggatcatggacaaccttaggatcactatattgatatgactgtaaggccttgagaatccacatattcacacttatcagctggttatagcttttcgaaagtttgagatgttgaatgcaaatttcaagaaagccaattaactcctctcttgtcggctgacataatgccaattgcttaaacctaaaaaaatcattgatgaaatagtttagttctctgttaaactctttgattgtactggcatctaactgagtattttcttctatgttatttcttttggaaatgtaaagtaactggaaaaacttgaaccttgcaccccagtactcatagtctaacggaccttcggttggtgtggcttcattaaatagctttatccaattttcggcatcaagttctatatggtttggtaaacgtccgagagcagatgctataacatggtaaggctttttttcttcttttatcagttttgaagcggaatctaggtcctggattgtaagagcttccaagaacgttggtttcggagattctcccacggtagaatagtatcttttcgtatttttcatcatcaactttcttaatccaagtaaaacatcatcctcttcttccgctggtgggtttaaattgatttgcttcttgtactggtcaagctcctcaacacgacaatacaactcctccaaattcaaatcatctcttctttcctcagtcattatattgataaacagcccatcaacgttagaatctatcaaacaccagccactttcatcattctctatcttggctattttgcccaaattagttttcctgcctagacgcctttgtctctttcttagtataccactggtgaccaaaccttccgatttgggtacttcatcaaacgtttctttaataaactttattagctcatcattacagttttgaaggtgtctaaatgatttcacagtaccaattaaaacatagctagccatgctttgaattgaagtggcagaactggagtgggcagtgtcgaaaaccacaatgtccgttactgccaacttatcatttagatattttgaaatggtttctagtgaagcaggaatttctgtaggaggaaaccgtatgggtttaatgaaaggagaatttgaatcttcctccttattctctgatatgtccaaataccacggcttgctctgtcttaaggagtgtctggtggtaaaatttcgaatgaataaggtagaacccggtctataacaaagacgagccacattgttgcgaagaagtactgcgtaggatctatgcatggttaaactaatagacaagctcaacttctcgaaaccgtatgaatccaggtaactggttaaatgtatgttcctgaatttttattataattgtggagcttctgcagatcgttgaataggaaccagttaatgttcatatattttttttttccatcataaaagttacacataagataatattatatatagttacaattttacaatttttcagtaaatatgaaaagagaggaatgtgtcatgagggtgtattaaatttgttggttattgtcctcttagttccggctgaatattttcatcaggaatatcgtctttcttgagattattatcggagacattttcctcggcttcaacttccttcaaatgagatgacaacaaccttagctgctccgccatgtcgtcatgaggtgataattgtttatggccagtgactaaatcgacatcgacgttcacgtcagaatcaacactttgatttgacaggatatctctggtagccattttaagagcttccgcgactctgtctctttctcttctgtggagctgtctcttggaatcgggtacaccgacgtctaaactttcatcgtcttgcacttgttctagcgtacgtttcagatcctcggtatcgtggttttctctagactgcagagccgctgcagcggcagctgcagcagctgcgacacgtacgttagtgtcatccagattatgtatagcggaatcatcattatcactgatcgaaccaattctgttctgatatacattatgtccactatcaacatgtgattggtgttgttcctggtgttgtagttgttgctgttgctgttggtgatgatgctgaacgtcgcgttgttgaccttcgggtagttggtgttggtggtgagctggtatcgatggatgatgatggtgttgtacttgatggtggtcaccgccagtcaattgatgagcggtgggcattgcgtatacgccatccttctttcttttcaagacgaatctggccttatacgtggtaacacgtctagcgatgttacttaacattttcttatccatttcagcttcggtcaacccgtaccgttgcttgatgatatcgagaatcccggattcttccacgtactgtgccactctaaactttgccactgtattatcgtcatcgttacacaacgactctagaatagcgtcgaatttgagatcaacttgtaaaatctttggaattttactcaagacaaaccgttgcaaagaaaggtttgattccaacggatggttatgataaggttcaatcttggttaccacgaagggacccttgatagtctcctgagagtctgcaactgctgcaactgccgctgcgatagcagcagtcacagccgcatcatcatcctcatcatcgtcctcatcctccgctctaccatcttcggccaaattcgtatgaccattatggtgattcgaaccagacgacgaagaaccaccatcgccacttaaaccatgcggagaaccatcctcagacgaaccagaattgttggcgccctgatacgacaacaaaatcttgaacggacaacttttcaaatggcacgcgaaagtgaaatgtttattcttatgtgaattcttcaaaataataggacatctcgattgaaactcataatcgttaattacatcgtaccacgcctctaacgtggggaaagaccgtttctgcgcactcacaggatctggcgcagccagatccttattgatgatcgggtgcttgtattcatataacgacatcgctggattcgaaactcgccaattcacgcacaaaaaggtataccttttctgaagctctctgttatcttttaaataatcctcttcgtcacccagtgcactgcactcgctccgtttactctctgccctatctcacttagccgccgtgccttcacagaataggtacgttcttacggtattatttcgtttataccaatcgacgaaacaatgaacctttcgcctaaatccttgggcctgccggcttccctttcgtgattgttgacactttcatctcaaatcctgttcgttcgttgttatatttttttttttttcattttttttccatgtggactgacccacttgaaggcgttggtgaggttaccctggatattagtacgctgattccgggtaacacatatttcagtgaagaatgataaatggttgcacgtgatagtgattatgaaatgagtgtcacgtgatatattataattattatcattattttcttctctctgctttttcgctccagcgtccattgagacgtataatggatagtgaaaaattacaggccatcagcaagggacgcgtcttgtcagctttaataaagtggtagtatacctcaaacttctgaatataattgaacaactacagcctctgtaaaaaaggccggtatttttttcaaaccagttatcatgggtatcaaaaatttagctacacttatttctgagcaagtaccgaatgctattaagagcagagatataaagtatttccatggaagaaaagtagccatcgatgcctcgatgtctctttatcaatttctcattgctgtgagacagcaggatggggttcagctcgctggtgaagatggagaaacgacgtcgcatcttatgggtatgttctaccgtacgttgcgcatgattgatcatggaataaaaccatgttatgtgttcgatggaagtccaccagaacttaagaaatacgaattggataaacgtaaggtgagacgtgaggataccgaggctaagttgaaagaagccacggaacaggcagaaattatcaaacatgaaagaagactcgtgaaagttttgccatggcataatgaggaagctcagaagttgttatctcttatgggtattccttacgttgtggcacctgcagaagctgaggcgcaatgtgcagagcttgctaaatcagggaaagtgtttgcagctgccagtgaagatatggatacattatgctatcaaacgccagttttattgagacatttgactttcagtgaggccagaaaacttccaatccaagaatttgacactgatgtgatttacaacactttggacttgactcagacgcaattcattgatttaggtatcattctagggtgtgattattgtgaaggaatcaagggtgtaggccctgtcaatgcattgaaattgattaaagaacacggttccctggaagccatcgtagagaaattcgaaaatggagacatcagtagtggcagatggaaaatccctgaaggttggcaattcaaagaagcgcgtgatttattcatgcaaccagatgttattccaagtgaggaagtgacgttgaaatgggaggaacctaaagccgaggaattgattgaatttatggttaaagaaaaagggttcaatgaagacagaattaaatcaggtattgaaagattacgcaagggtttgaaagtcggcgtacagaaaagacttgactcattcttcaaaattcaaccgaaaactaaggaagagctagcaaccgctgctaaaaaggcaaaggatgcaaagaaaaaggctgctgctaaaggtaagattgccaagagacgttaagttttattgttttatcttaggttagactgtttacattacattaccatcaattacatagttaattcaaaatcattgaaaagttatagtaaaaaggaactgaaaattattccagttcgtcagacgttcattaaccgataatataaataaatatgggatgatattcctctaaccatgtataactagcaaggtaagtggtttattccaactgataacatacatttgtccataaatgtgtatcatatacatatatatatagaatgaaccagcgcataaactgtattgttacgagtcaatgttcgagatgttatatgtctccaaaattcaattaattgatttcaaaaactacgtaattgcctacagtgagaactatgttatatattatcgataatgtacaaatactagtatttattgcaaatgctaaaacaaaggttctttgccaacgactctgtctattaatatgcgcacggtaagtgaacaaaagaaggaagagcaaattttgttatgtgtatggaaggtgagtgctacaattagaaactgaccttatctgctgaacgaagaatgaaaatgtttactggcgtaaacgttcagagtggtacttggtttctttaactaacttgatggcaacttcttctaactttgtgatttcttcgcctctttcgaagataatgtattcgttattttcatccaatttggctttaacttcgtaatcattgatgatgttttgtgctacagccaaaaccttttcgatatcaagatcaaacaatttcgataatttagaaatggatattttagagtagaatctcttgtaagtgaaaatgtaagttttcaaagtttcaatttgaaccttttcacttagttggttgatgatatcatcagatttactcaacaaagaccacacagaaattttcctcaaatattcgatcgattgtaagtaatcacccttttgcattgactttgcagcataaagaatgtgatctcttagagtttctggaggaccatggaaaatagctttctctgaactctctagaatacggcggatagatttttggaaaactgggattctcttgaccttaataccgctgtaataagctgccatgtgaggcacatcaagtaataaagaacatgtcatgtagacggtgtcaattagatccaagttgatgtgttgatggaaaggaagacataattgttcaacaggggcaccctgcacgacattgctgttcgcattagctctttgtaaactttgttgacccaaaatttctcttagatgtggattaatacaaagaccgttcaaaacttggtgacattcatttattaaaccagccttaaatgcagccaaaccaagttgaataacacatctattgtacaaaatttgtaatgctgcatcagagcctgaaatgaatttagcaatatcggaagaaagcattattttctttgctggagcgtattcttggttcaatgcaatataatatgttttgtacaaggtaccttttctgtagttgaacacgttgttactcttttgtttaattaagaaatcggacaattcagagatgaccttgaagttgtaatcggcatctgcggaatctgattcattcaaacgaacgaaagaggattcaagggacgcagttccttcacgaatttgtttccatgcaacggtttccataatagagatgagcttgtcggacttgtagtagatatgttcaagtcttctgttgaagacacgggccaaaagtctatcgcggtgttcttctgcagttacacgttcaaagtacaattgggatctgataatcaaattgtaaatagattgttcatctctcaaacgttccatgtattcactggaacgagtgtcaatgttcaaaagggatttgctaaattcatcgtccaatctttcaaccatagagaagatagaacccaaaatttccttgacaccatgctcattagcttctggttcatcttcaatgaaatcatttcttggggcaaattcagtaacttgatagtggtcgatctcttgttccagcacttccaataaaccatccaagttatcctttgatgctttccattgttctagtggttggtatgataaggatacagatgcatcgaatctgattggaatcaagttcaagtatgtacagatcttttcatatggagtcttggcaatcttcaatagttcttcggtggttttaatttgttctgtgtggtcagtgtttttcttacctctagaatcgatgataatattcaacgtcttgaaaaagtctagctcagaaatgttatttgccacggatgccaagtctaaattcttcttaccactcaaggagaatggagtagcagagacatctcttgagtctatatcagcatctaagacaggttccttgtcaaagtcctctgggttttctctgtaagccttaacggaggtttcgttttctctgattaacttcttaactctttgcttggtggtgttataagctcttgcaactgccttattcttaatttcatcctgagaagtagcagataccgcatcttcaaatctagccaatgacttcacaaagatattaggtgtaccgtagttttgttgttgggcttttgtgtataatttcaaaatggtttccaaatggtttaataatgattcccaatcttgttgggcttctgcggaatcaattttttggtaaatagatttcatttcatccaacaacttctcttttgctgacttcacaaccttcttaccatcttcttcgtcggatgagtcttcatcagatgaatagttggtagatttcaagaacttgttagcacctgaaccaccaccttttctgaattctggcttcttgaaccagtcagggccgtagggtttgctatcagaatcattgtcttcatcattatcggaactctcatcagagtcgttgaagaaagagtcatcagataattcttcctcactggaggatgaaactaaatcctcttcactttgagataacaagtcttcttcttcaccagaagacgttgaatcgtactcatatgtcttcaaaaaaaaacgggacatgatgaatggactatcgcttaacgttgttctatttccttaataccacgtactaatctcaacctagtctccctgttacgacctggtgattccaacctacaattgaaaagtattgcttattacacgtctcaactgaatttcatctattaattcgatttcaaacctttcagattttcttttgagatgagctttcactgagtgaaaatttgtgaaaattttcaaataatcatggaacacgattggtagccgggtaatgataaatgaatgtaccattgcaaagaacaaagtgaagtgggagtctgtcgccggttgatgttaggccaaaatggacgtctaactttgtgtgattgcgtataatcatcgatgataaatagggtataaaataatatcgatttaatttagttatatgaaaagtgaaatatagatgttgctaagaaataaaataattttgaagctttcataccatatacgatgccttcttgatcgatgttttgtgggcatacttcgacaacgggatagatacatttatggttcatgaaaatgttctgctgttgtgatatataaagtactcttttaatgttcttttttttttttagtccaggaattaaaatggatagtatcgcaatttgaagaattcaagtaggtaataagttaatatcacctttagataacagccgtagtaacaagtatgaatggatcaatttgctgaaggaatgtgtgacctaaatgtgacatgaaagcttcatttgtataattttgagttgttaataggagacgaaaggaaacaacaagtcaacaattataaccggtatcaaatgagaaagtggaagggtaaaaaaaatacacacaatctgtattgtatgttaaagagaagagaagctcaactcaaaaattaagagctgaaatcacaatccaacttgaacttcaagtttctgttggcatcccaaacaccccagtacttttcaacatcggaaataccagaagtatctggtttccagtcctcatcgaaagcttcgaaaacgataacgttgacaccccagcctctcatagcacaaataccatcagcccaaaattgcttagcgttatctagacctgggtaagcactttcaaagttggtaccatcggttggccagccagtttcaccaacccagaattgaatgtcagtagaacccttggtagtttggatagtttgtagagcttgcatgatatcgtcgaagaacgagtaagaagcattatccatagtttgaccttgccagtaagagaaggcgttcgccatgacaaagtcagcagcttgaatggcggtagcagatccaccatcgaccaaaacgttccatgagtcaacagtaccgacttgcttgccactgtaagagttaccatcggaatccttgatgtctttaatgtagtccttgacatcagagatagcatctgccaattcagaagcagtcatatcttcacggtacaaagcttcggaaccaaccaagaaggcttcgatggtagaagttttgatccatggcaagtattgagtcaaagcttgcttttcttcttcgaaatgagcagaatcagttggccaaatacccaagaaaatggtaaatccggcttcttctgcagcaggacccaaaatttgtaaagtgttacaatcagaagcagcatatactttgaccttggaggtgtaacccttcaaagtttcgaaatcagctaaataatcatccttttgcttacaagaaccatcgtgggtcttaacacctaagttgaatgcaagctcaccaacagcagcaacagttgaagcaccggccaacaaagtggcagaaacgagtgtagagaaacgcatagctaattgattaataactatttgccgagtgacgttctataactaaagagaagttacaaaaaatttactgtattatgtgcttgcaaagtaacataatgtagatcaaaatgtttaatcactatgagtattatttattattatttattatatacatttttcatttttggaatattttcgtttcagttttctctcttcttagaaattaccaagcaacgtccattctttttttctctgatactaaaaatagtcaggtgggttcgagaatgtacgcacgtgattttggggttttgcttaactaaggaacaatggttgatacagatgtggatttcaatggattatataatggtatgtaaatatgctggcaatggcctgcggctgcaatgctgaattggtattggtatgagaggggagtttgtaaattagtaggttgatagcagtgtcaacgcaatcatgcatgcatcttcagtacgtagctgtccttgtggagtagagcctggtaggcttaattcaccatcgaaaaattcgaaggcaccagtggcaccttcgaattgttctttacacgattcaaaacttttcttgacatggtcccattttccgaatactgctagtaagtttgctggattcgctttggatgggtcgagttcaatttcttcttcggtcggtctaattaccttttcgatggatgggatttgagtttgtaccttgacgtttttctttagagtttcgtcaaagaaaaagtctccgctgttgatccataccgtttgggtatacccttgtggaaatggtgattgtgtgaaaagatctgcgaacgatttggcaactctgacatggtatccgaaagatgctttggctccaacgaaatcaccgtacgcttcttctggagatacgactttctgttcaattgtatccacggttactctcacatttattggaaccaactggcctttcaactcgagattcttatctttgccaatgttgatatatttcgtttgatcgaatgatttctttgattttccacgttcaccaggtttgctcattctgattgccagcccttctctatatctaccattattatcttgataaaatctcatgaacggtaaagaaggaattctaggcaattgcttagcgtaagtaaaatacttcatatagtcctttttgaacacactgttgacaaggtatggcggtgtgatgaagaactgtagcaacgaagccatcaacattggttttgaaagccttttcttcccatcttctttttcggaatcctctagatattcagttgatgcattgttggtattattcccatcatcaaacttgatctttgcaccctgttttttatcatttttgcggtctgattcgcccttgttggtctccgattctgccttcaaaattactatttctgcaacgttatatatacatgcgcttctggcgatctgatataatgtgtaggtgatttgttccaaattcttgcacgaatctaatactgtagtcggtatgcatatggaatggttgacggttttagttgacactttaaccactttcttcgctcttttgaattgagctagatgatctctcttttcagtaactttggtatctctttttacctttttataattctgtttcgattgctctttgcttcttttaacactcatggctatagattcgtcagatgctttgacactactaatgaaagttcccgtcctaatgttatgtatgtgttggcgctcttatctgaatgtagtatataacaagatgagatgagatgcgatgaggtctattcaatatcttctttctctgcgaccgctgcgagatggaaaattttcccatttgtacagaatcatccatcacgtgacttaattgattctgctcaagctcttgagtaagggggagtcatgaaggaagccaacaaaaattatcgataccaagctgatagatcaagttacatgtatgtgctagatattttgatcagatgacgaaatcaccctttcctaaacctgtgatgacagaatagctcattggaaaagtggtgaggtaaattactaaaattatacgtagtttaaagagaaaacttaattttacatgatgatttggaccgtctaataatatggaatgagaagctgaggcatacaacgaagtaaaatcattcgttcattcatcatcatcatcatccggtaggttttgcttggcattctgcaaatctgctttaacgttgtaatgtttctttctcatttcttcgaacttccgatgtttcttggcagcttcatcttcctctgtttcaagaacaggaggagaaacctgtggatcctcattgtttagcaatgtaacgggttccttgtcctctttcagatctacttgaggttcgcctaaactgaaaccccctaaatcttcatcatcgtcgtcgatcttgtaatactcaccgtttgggtcaacagcaccctggtatggagtttttggttcatcaatatgtatatcgccgaactcctgtttggtgatttcattctcttccaaattcttcttattccatttcaaactctctggatcttgttctcctaacttcatcgatagaacgtctttagggattccatgtccatggtgggctattttactattagacgtgcgcttcgcattcagttccgtattcttcaaaacttgttttctgaattgactgatggattcggattcaatattcggactctgttcctcaggaattgcgttctttaagattcctcccataatgtaaagttgatatattacaatacttatccgaggtagttaaaataataaagtaaggtatatcagacacagaagcactaaaatgacacttgttagaatatgctggtttaacctcttgtaacaaaactaaaacgcaggctcagtttgtggagtaaggtatgagacgacttcttaactatgatgaataaggcttttttttatatggtacaattttgggttcaagattttccctttttcattttcaatccaaaagtagctagtaataaatgcctgtgttagttaaagctatagcagaataaaactaatattatcactaggtggtggtcttttcggggtcaatttgtacatgcatgtgtactaaagaataactatatagtatttgattatcttttatcttatgagctcgtgacaatacagtacaggcgaataaaatgttattatttaatatggggaattgatcattaaaaggcgtccggcaatttttaatattggaaactcaaagtataattttcaatatatataaaagtaacactacgaagaacctgttccataattgcagcataatcaaatgaactgagaaatgaataccgcttttatagacgccagccaatacaagtatgtaattacacatattctatttttaaatgatcatgcaaccgttcagggctggacaaaatgaactgaagttcacatattctaaatgggagtttgatgagggcaaaagaactctttgggattttagtttgctttgaagaaataaaagcatgttaacatcagtagatctttttcttctcgtcaattgacaattgaccagcaccagtgttgccaatcaacaataaacctccaatgatacttaagttttgatagaattcgtatttcaagaaatctcttttgctagacccatagaaccaatagttgttgacggtaatgttatagaacgctagaatcaaacctaaacttatagatgcgaactttgtcttgtaaccaattgcgatacaaacagtacctgcaatcgtcaacaaaactgtcaaccaactcttagtaaaagtaaaggtaataaagagcaaaaccattagaattcttccagccaataacaagtaatttttgaatttaccatccttactgtctaattcaggtagcataccaaaggtcatcctgttggtaacaatactgtcaccaaatgctatcaataaacccccaatgacactaatgtttctcaagacaaaagatgatccggtgaacagaccgtaaaccaaaccttgtaaaatgacggtacaaatcaatgcactggtggcatacacggtttgtttcctcaagattaatagcgtggcgcctgtaaacatagagatcacaacgcaaaataagaagaaaacgacaaagtagtaaggaaaatgtctgtagttccataaataaaacacttgatctgaccattgagcaatgattctcaacgaatcctcataaaatgtggcaacaataaagaatctagcaatgattggggtgtaaggcctaattttcaagaccaatggatgttccgttaagtcttcaacccttttagcgaattgttcaaataatcgcctgtacttgtccttagctgaaacattgtgagattgtgacgcttggccatacgatgcaccttggaacccaggctttgctgttggaaacgtatccaaattgttacctctaaaagacatggctcgttcaatggtattccgcttcagtattaccaattagaattttgcgctcaaacagaaaatactatgcacaggtattacggtgagctatacttccaaaacgacacaagtaatggcagctcgcaaaataggttccaattccttagatatccactaccactgaactttcactatgttttcacacctgttctcgtttggttccagtactctgcaaaaaaaaactgatctgtcttttaggttgggtccttttttctcccacactgttattgtttttgatttttcagtactgatcaatactggacgttgaactaccgtatatatatagtataacctaaaattttcatactatttgaggtttaccacatcagtccatgtatgaagcccgatgctacgataaaccagtaagcgcttgaagtatttgttcatttctgcttgcaattcggattttacttttataccatcttaaagtcggtatttatataagcgataccactatctgactttcctggaaaccgaagtaataggtagctgtcagattttactggtatatatatataaatcgaagggttaaatagcagagccaatgtcagtagactatgttatatgctatatatttcctctgggctggttttgaactgatctcatctttaaatttataagtagtaagagacaatagcagccggtaatttcccagcgtcagtcaaagcctttgctgcatcagacaatatgtttttagcagcagcagtatcactcttgatcttttcagcaacgtcaaccaattgttcgtcgtccaaagagtcgacaatcaaaccagtttgttcctcgatggtagtggatttgtcggcatcaccaaagtaatcagcatcctttggagcgttacggatacttctcttattcttcttcttagcagccttagcagcttccttggccttctttttgtcaaccttggcagatgcggcttgagcagcgtccgcttcagccttagccttagcttcagcttcagccttggccttggcttcagcttcggctctagcaccggcttccctttcccatttctttctttccttttccttcttttcttcttccttgaattgcttgatacgtggatcttcgttcatggctctttcgactaatttcaccaaacgagcgttgtcagcagtcttcttcttatctctggccgccttgttctttctttcgatgtaacgcttgtgatctctgttggaagaatcatcaggaacttcttcatccaagaactcgaatgttctccaagagtcgaatctgtgccagaaagagtagaacttttcaacgtcttccttggaagtgttcatatcacccaaagttggtacatccttcttcttggagaaacgagcttcagattcgaaaacaggagcccaagcttcaaagaagtcgtagttagtacccttctttggcggagctacatcagcttcgaagtcacaagaatcatattgcggtctcttgttggagtcagtcaaagtttcatatgctttttgaataatcttgaagaaaccatcttggtctaagctagcaccagaggcagaagtcttatcagggtgatacttcaagacttgctttctgtgagccttaataatttgttggttagtggctctgtaacgtaacttggatagacccatagcagcgtacaagtcagcagtcttccagtctcttgcgtcgtgagttaacaaactttcgtcagctaactcagtgtcgaacaacaactcgtctggatcgacattggactgttcaacgttttgaacattcttttcagcctcaatcttctcgaactcagaccatgtgtggtttctcaaagttctttgagcgtggtgcaagaagaatttaccaactggttcaataggacgtctaatggatggtgttagtttagcaccagattcaacagtggcaccgacggcaccagataatggaggtagttcaaacattgctttgattgctgttatcggtctgacgtatgattatttgtgtctggacagaacggtataacccatcgttcatcaaaattaagaccagatataatgcacatgagaacatcttgataatttttttcttcttcctatagatgcgatgagctcgaagtaaaaataattgcgaaaaaaatcaacacattgaaaacgacgtagcttgaaatgaatagaattatctattatatataggttatttctgcctagataaaatgatacaactacgacaagcgtatgagtaacgaataacatacccttttcatattgggtctcgaatacggattggtgtaactgatgttgcttttcgaacgcagctgcaacttcaaaactaagagatttttaagttgatatagctaacgattaatagtcatcaagtactcttttcacataatgggcattatcgaagacagagtcttctaattcgatgagtccagtttctgctttatacacagaccagtgatcaattatcttttctaagatatctgggtgctctttggacaaatctgtagtctcaccagggtcttcatcaatgttgaaaagtaaccagtgaccagggccaaatgggggtggaatatacacacctttataaggaccttggcgaatggcacgttgaccaaataattcccaaccagtgaccctggtatcgtcatatattctttcggattctttttttaagaaaggaatccatgacaaacctcttggttcgtgcaccttgcgaccttcaaatgaggtacctggatgaggaacgttagccaattctaaaacactaggtaaaatgtccataactgttgtaaactggtcgatgatttgacctggttcccatagtcctgttaattgtggagcatgtaagataagaggacaattgataccaccttcagttgcccacattttatacatataatttggagcagtagctgcttgagcccacaaatcaccataataaacaaaactgtttgttttaccaatgttgtcaaaatcgttgttataatcggacgatattctttccttgaaagtggaacctccaaacggcaatgcctccattaacataccttcagcaccattgtctgacataaacatgatgacagtgttgtcgaattcatcggtttccttcaaatgatcgataactctaccgatattttggtctaattcatcaaccatcgcggcataaatttccataatacggctttcgtaggcctttcccttatcatctaattcatcccaagtcttttctctttgagtttctactaaatgagcaacaacatcagctggaacaataccaagatctctagctctttccaatctttgtcttctcaatgcctggggaccaccattatacttacctttgtattttgcgatagtctcagcaggagcctgtaatggccaatgtggagctgtgtaggtcaactggccaaagaatgggcgaccttttctttcttcatcatccttcaaatattccaaaaatttatctgtgaagtaagtggtggaataaaagttttctggaaacttgttatggtctaccctttcgccattttcctgataaatccatgggagaagaaacttgctatccaaattgcatttgaaatggtttcctgcaccaggcagcaaggtaaaacgtttttggaatccacggtcacttggccaatatggcttttctaatccaaggtgccatttccccgaaatcagcgtgtaatattctggggataatatttcaggcaatgcagcaaccttatagttcaaataaccttcataaccaggtttatccttgaacttttctggaaattgcctggcatattcagccatttggcccaaacctgccaaatggttgtcagtaccgctcaacaacatcgatctagttggcgaacatgccgatgcagtatgaaaaccagtgaatctgaaaccacctttagacaatttatcaaggtttggcgtttgtatttcacctccaaaactcgacacatctgtaaaccctaaatcatcggcgacaataattaagaaattcggctttttaggttcatctgttttggtcattgcaattcgattgtacttttctctaatgcagtttgcggattttcggatagatcatagagtaacaattggttagtataccttcacaattcctaaaagaccatgatgacaggtgagatgatccatatttatattgtaaattatgtcatttaaagctttactcgaagtgataaaaagggtgacagtaaaaaagtttcaaggtaagaactttctgtaaactctcatgatcgggtggagcgaacagtaaccggttaatttagtaataccttacacttccagagaaaagcccggtactttccagtttgcccagaatttagcagtcaaacggagtctttttgagtcttttcttccaaaatcttacaaacattatgatctagcaagaaaaacatcacaatttcatgtcctctttcttgagcggatgggcttgctgtatctattttggttatgacaacctgcaaaattaggagaagtcacgtgctattaagtttggtagcgcccaacagttcagcatcaagtgcatgtattccgtatccacagataagtaaccaaatgcctgttaatgttcacctacggcttgacaggtaatatgtgtttaattttagatgtgagatgtccccacaaatgcgttggcatgttgcatcacctgcattagcttcttacttggccacccattatgttacccggtcacttttcatggaggccctcaaatagctgaggtattgaatgtctgaaactgggaaacagcgcctaaagtaaatacgaaaagttacccgctcttttgaacaacctcaagactttcgcaataaaataccagaagaggcagtgggtctgcaataaatggagatcttcaaaattttccgataagctcaccagaactcagcgcaatggttttgtcgcttactgaaagggcacgaacagttttcaaaaaataaaaaaaaatgatatgagcttcctctgttacttccactggaaagtcacgtgacaaataccgactatttaccttcagaatcatagttaatatagttgacaaccggttcgagtagccaattccagaatttctctacctagttcctctgttcattgtcgttatgtctgatacaggttatgcatgtacaaattattatacgacagatggagtcacttgcaaacctaatacgttgacgttgatggtctcctccggaacttcggaatctgcattgaacgttacgtaaaaaattggaaaatagtctaaaaaagaatatgccaactgcaggagtatatcatatatatatttggggaggatccatacgcagttgaatagcattggattctgggaggtgtctttaaaggtttgttaacatttcgatatctcatgtgtgagtgaagtaaacttcttttagatatgtcatccgattcaatgggtgtaaagggaattgatgggcaattaacacaagctgcaatgtcaaatattgaaactatcgagttgaaaggtattaatgaacaaaggacgaggaagaacgttatcggatcagaagtaggtataaatataaatgaactacagcccgtccaaagttttgataatgatgacggaggttcagatgcctatacagattacgatgacgatggttttacgtatgctgagggagggatcgcagcttggctagttgttcttggctcatttttaggtattttacctacatgggggttgtatttttcagcaggtgtcattcaaacgtacgttgcacgtcaccagttaaaggatgagtcaacatctacagtatcgtggattttctctgtttcgagttgtttgttattagggacaagtgtcttcagtgggatgtattttgacagatatggtgctagaaaacctttagtgataggtacagtaatgaccgttgggggtgtattggcagtagcacaatgtactaaagtgtggcagtttattcttgcattgagtgtttgcgttggcacaggatcaggtattacgtctagtccgttattgggatgtatctgtcaccattttcagaagcgaagagctattgccactgcagttgccattaacggtgggagtattggtggtgttattttcccattattcttagaaaaatcgtttaaaaatttggggttcgcctggactatgagaattatggctttaatttgtggagtatgtttgactgtttcgatgtttttaatcaaggaagaccccgagaaacgtgcggctgtcgaaccgaaagatgctagcactcctttccacaagaatttactttacaacataagagattcctttgattacaagtctatagtatccgatcaaaagtatctgttttgtgttttagcttcgtgtttggctgaggtatctactggtgccgttttaacctatatcacatcttactgtacaacggtagggtattctgagaatacttcatttttacttgtcaccattttgaacaccttaagtattgtcgggggatacatgtttagttttttggctgataaagtgatgggcagatttaacgtcatgatcatgatcaatttcttgttaggatttgtcccgctaatattttggttacctttcggaaacataggtccttcggtaatgtacggattttccgcagtctatggtttgttttatgggtcattgattaatctcgctccagtctgctgcggtcaaatttcaaggacaaacgagtttggaagaaggtatgcaacaatgtattgtttcgttggtctttcatttctagttgcaattccagtctcaggtgttatcatcggtgatggttccttaaagaattataacaactttatcatctatgtttctgtattgtccatgatttctagtggtttatatacgatgagcaaatgttacgcggttaaacaaaagcttaatagatcacctagaaatgcgcacaataatacaattctatcttctgtatttgcttttgttacaaagaaattctgaacttttacatctggcttatatctaatttgcatctttccttatgttaccaatttttattccttttgagctattgtttcctctgccaattagtcaaatgtcaaccgataacaacagttcttcatgagtcattgggatataacactgaacgtattgagtcagtactagtttttactgtgattataaattttgtatatatacatattacgcaatgtcattaaaatcgttacatggatttgtggaggaagcaccgctcacccattatattgaaagaagaggaaaatagtcaactctgtgatacggccctcactttctctgtcttttaataccgtgaagctcattaggaggatctgaattggaattggaatatgttgtatttgtcaccatcttcgaatctgaacgttctgatctatctcttttaaggttgtcatctgttatttccttgataggtggtagagccggcagtttttcaggttgtaggcttctggtatacatttcagagttgatgatttgctgagtatcatcagtttcccagtcgctattatcgggttcctccaggtaccagccatatggatcgttttcatccatgttgcactgccaactaggttttcagaagtgtcttggtattgcctcaaatcacactttctgattaaacctaatcagcgaaggtagcagtaatttgctatattagaacactgttgtagggaagcatgaacgtatcacagctcaataactacacttttagggacttaatcaacgtctcaggtatttaatatgatagatacaattctacttcgttagcatctttcaaggcacttttcttttttttttacatcaaaggtgaactctggggttttttcaactatattgtatggctctttatggatctctaactacaaccttagagacaacgactacagtatcgttgaaaaatcgaataacatttatcaagtttatcatctatgtattattaagaaatatgttcgtatatacaaactttttggtgtaataccaattaagagaattattattaatttattttgattttgagattaatttgaaggataattaaattggtttgcagtgtaagtactcactccaggtacggacttcatgaggaacaataacatccttagattccaaaaccttcaccttttctgcaatcttcagactcatagctttcgcaaatagcatagcagtttgtggctcattgaataatggaagggcaaagtcaatagcatttcttctcatgatataatctacatcttctaggctctctgctctcttggcggcaagattgaatacagcactgatatccttggcttggaagagttcacgcaactttctcttgtcattttttgggaattcgattagttcgactgaaacgcccttgctgaacgtctccaaatatttcttggtatcctcattggtagcatataacttgtaacccaatggtgcaacatatttcaccacttcacctagatagttcttagataggtcacccccgaagagaataccacttggtgggagaggaacattgaaattcattgtactttgaatagcagtccagtaactctctaacgcattgctaccgaaggacgcaacctcaccggtggatgccatctcgacacctaaaaatggatcagctccggctagtctggtgaaagaaaattgtggaaccttggttgcaacatagtcatatgctttgtccattagatttacaggttcgggaacatccttgctcaaaaatgcttgaacagctgcttctatgaagttaacacctaaaacttttgagacaaatgggaaggatctggaagctctgatattacattcaatgaccttcaaggaaacaccttcatctctatcatctttgataatttgcatgttgaaaggacctgtaatattccatgcctttgcaactttgtcagcaatctctttcaatctatctttgatattttgagacagattttgtggaggtaggactaacgttgcatcaccagagtgaataccagcgttttctacgtgttcagaaatagcatgaactaataccataccattatgtgctacagcgtccacatcaatttcttgagcaccttcgatgaacttagacataacaactggatgatctggagagacgtccgaagctgtggtaagttttacttcaagttcgtgctcaccagtaacaacactcatagcagcaccagacaacacgtacgatggacgaattaaaaccgggtatcccacttgattagcgaatactttagcttcttcaacagaagacaactcactccattctggttgattgacgccgatagaatccagaatagttgagaacttgtgtctgttttcagccttgtcaatgtcttcaggagaggtacccaatatgtgagcaccattgtgaagaagtttcaaagcgatgttctgtggaagttgaccaccaacggagatgacacaaccttcagaattctccaactcgtaaatatccatgacacgctcgaaagagagttcttcgaaatacaatctgtcaacttcatcaaaatctgtggaaaccgtttcaggattgtaatttatcataatagttttcttcccttcttttctgagggcctttgtggtgttaacagcacaccaatcgaattccacacttgaacctattctgtagacacctgagccgagcactagaacaccattatcagtgaattcgatatcactcttagtagcattgtaagtagtgtataaatagtttgtttgagcagggaattctgcggctagggtgtcaattcgtttgacaaacggaacgattccaaaggattttctgtaacttctaacttctaattctgaggttcttgagtcactacccttgttcaaacatagtgcgatttgagcatcagagaaacctagtttcttcgcttcaagtagcagttctttgtccaaagattccaggtcattaacctgttccaaatctttatacatgtcgactatgttcatacacttgaataggaaccatgagtcaattttggttaattcatggaccttttccaccgaatatccttcatggatcaaagcttgtccgacagccaaccatcttctatcggtaggttcactcaaagcattgtccaaatcatcaaattcatcagacccttggaatccaatgaatgaagggtcgatttgtctgatggccttttggaaagcttcttcaaaatttctaccgattgccataacttcaccgacagatttcatagatgaaccgacggatctgttcacgtgctggaacttcgataaatcccaacgtgggatcttagcgacaatgtaatccaaagatggttcgaaatttgcaactgttgtcttggtgattgggttaggaagttcaggtaaagtgtatcctaatgcaatcttggcggcagtataagccaatggataaccggtagcttttgaggccaaagcggatgaacgagacaaacgtgcattcacttcaatgactctataatctaaactgtctggacttaaagcatattgtacgttacattcaccgatgacacccaagtgtctaataatcttgattgctgcgcttctcaacatatggaactcctcatcggatagagtttgagaaggtgcaaaaacgatagaatcacctgtatggatacctagtggatcaaaattttccatgttacacacagtaatacaatttccgacacgatctctaaccacttcgtattccacttctttccagcccttcaaagatttctcgacaagaatttgaggtgccaaagaaagagattgagaagctaattgtttcatttcttgagcgttattagcaaaaccagatcctaaaccaccaagagcgtaagcagatctaacaattactgggaatccaacaatgtcagcagcttccaaagcagcatcaacggtttcacaggcaatggactcagcagttggaatgtcgatctcttttagagcttgagcgaaaaggtctctatcctctgatgtttctagagtcttaattggggtacccaagaccttaatgttgtatttagctagtacgccagctttgtccaaagcgacaccacagttcaaccctgtttgaccaccgaatgttagcaaaattgcatctggtctttcgcgttcgatgatataggtaatatactccggagtgacaggcaaataataaatctcgtctgcaagagaatgagaggtctgattggtggcaatgttagggttcaccaaaattgtctttttgttagcttctttcaaagctttgatagcttgagaaccagaataatcgaactcaccggcctgaccgatcgaaagaccaccagaaccgataacaagcactgattccacaccttccactaactgtggattatattcatcagtgttgaatgccgatgtcgtgggttcggtagatgaatagatactagtagacatagcgagtaaaatggttgggcttccttgtagttgcttcttatactctactatcgtttttttcttttggcaacgactgatatcttttttgataagagctatgctgaagtttaaattccaattttgatatcagtgtattgctctttatatatatatattgcccaagctagttgttccttcttatttgcgatgagtcaataggaagatgtgataaaggttcatcgaaactaaatactcaaatagtgacgctgaaaaaaattgccaaatcgatgaaaaaacaatagaaaaaaactaaaaaaaaaaagtgctatgattcattgtaagaaacactgtgcagctttcttttctttttcccatcatatcatcattgatttggtgatgtaataattgtgcttgtgttgaaagctagagagagttctttcacttcttaaattaaaatttggaaagagctgtatatgctaattaaagctatatatcaagatcttccagaaatccaagaaataaaggacgagtcaataccgttacgtgaaactttctcgaatgcaaaaacaaacatcgggctattgacacataagaagagactcatccttgaatcataagacgcactacgttttggtataggtaccatttacgtttgtcttcagtaacaccgtagtaagaatgctgttttcaaactggggatagtttcgattgttcttgcacttagaggatgtaaaacctcgaactggattagaacctaagttttctgatcgtttagtgcaacactcagcgatgtgaaaggaaaagaaaaatcaaaggaaaaaaaaaaaccaaaaccaaaaaactggccagttacccggaatacccgggtaatacttactgtcttctaaaaatttgtcattccgtgtatttactgacgcgtgtcagaataaataaccagccacacaaagagtgtatgccctggcatgtgttaagatccatctatacgaaagtatacgagatagagaagtacaaatagaagagaaaaatcaatcttatgccaactcgtaggatgattaggcattatataatggaaagatgatggtggagggagcgagcgatactcaccatacaacagtgtataatgaatagtcaattgatgtcagatacagataatatgagcgaaggaatatcatcatgtcagggtaacactgaacagagagattccgggactcaatagcatggtcaggtgatgcaaataatactcttaatgcttgtattatattgccaactccgataaaagtttaactgacaagtattgttagtagggaagtgcggctgctcgaatcgttctacccaccaagacttcagtccgggctccagacgtggggtagaaatgtggattaaacagtatacggtctgcaaatggccgcccaacttgagctgcaaccgactagggaccgcctgaagatgaacatatacgataaaagacaaaaacaaccaacctcgatcacgtgataatcttagacatcactggcatgtaagaggtaaccctttcggctccgaattggttcttttgaagctgacaaccactgaaaattttccctggtaactcgagagacacattgaaaataataaaaaactgaaaaaaaaaaaaatcaccataagtatgccattgacccggagatttggcttcgattcagaacattttggtaatgttccgttcttattggtctcttcgctccgtctgatttttcagcttgccaactagttagtccggactccgatttgccggctacttaaccgctatccaacatttctcctactagccactcttcggtttatctctgctttcccccttctttgaattcatgcgaaacacaaaaaaaaaagacatcattcatttttccctttcgcccctttgcctgattgctaggttcctatctacctagtaccaccaaaaaaaaaaaaggcagactcaaaggccttatgattcttttagagaaagtatctctattgtaaaacatcccatgcagtttgcatgggaatattcatagagtaaaaacccattagtttgatccatatcgcctagaaagctcaacaggaggagtaagtagcagttaaagatcattggtggattccgagttgatcattgaacttaacggagcatttctcatttctcactgtatatacagttttacgtacttcccattcactgtccacttattttggttgttgagtagggtttttttttgttttttgggttcccttgcagtcaattctcagagttctacagtccgagcctctgcccgttaaatcagtactagatgtgggcctagtttttagtcactctctaatgggatttaatttcggtctttttacgggttttacttataacatagatttacaattctttaaacttttgaattttaggaataagatatataaatgtggggttttaattgagtttgatacttgggatttcaactaacttatatctgaattcgtttctgaattttttgcatatttatctcgtttccccttaaaggtgaatcacagataaagatagctttaaaaagtcgtcatatttgtttgtttgaggtattaaatactgccaaaagacaactagaagagaataataacgtgtatatttatattcgcacagtcggtttacagatcttttcgtctttttattttgaattatatcacatcattctacagaaatggcttcgaaacaaaaatcttcaaacccagctgtcaatttgattgctggcggtggtgcgggtctaatggaaggtctatgttgccatccattggataccatcaaggttagaatgcagatctacaaaaatgctgttggttccggtgtaaaagcaccaggtttcatcaagactggtggtgaaatctatagaaatgaaggtttcttggcattttacaaaggtttaggtgctgtcgtcatcggtatcacaccaaagatggctattagattctcatcttatgagttctatagaactttgcttgctgataaggaaactggtaaagtttctactggtaacactttcattgctggtgtcggtgcaggtatcaccgaggctgtcgtcgttgtcaatccgatggaagtcgtgaagattagattacaagcacaacatctaaaccctgtcgaaggtgctccaaaatacaagaacgccgtgcaagcttgttacaccatcgtaaaagaggaaggtttcagcgctttgtaccgtggtgtttcattgactgctgctagacaagccaccaaccaaggtgctaatttcaccgtttactctaaattaaaagaattcttgcaaggttatcataatcaagaaatgttgccaagttgggaaacctcattgattgggttaatctcaggtgccattggtcccttctcaaatgcaccgttagataccatcaagacgagattgcaaaaggataaatctactaagaatatgtccggtctcaaaagaattaccatcattggtaaacaattgatccaagaagaaggtttccgtgccctatataaaggtatcaccccaagagtgatgcgtgtggctccaggtcaagctgtcactttcactgcttatgaattcattcgtaaagaattggagaagaccggtgtattttgaatcgatctaatttatggttctcaccatcatttcttttccttcaatcatgctcctactaccatttctccctctctcattcaagacttctcaatcataattatagattttgattattgcattagaattttgatatattcataaaggtgttttccacaaactaagagaatggttaaagagacaaaacttcttgaagtatttcaagaagaactaaaaatattcccacgcatcattacgtttcttctgttaaaccaatgaacaattcacccaataaaattcagattaattatgagacgcagttgaaagataacacaaaatgttatgagatgctatagtgtttccaatattagaattcgccaaaagatcaacacacacacacacactctctctctctctctctctctctctctctctctctctctctatctccaccaaagtaactcaacattcattcaaatttttcacaatttgtatcaatattattattatcattattactacttttgtctctacccttcgttagaaactgaatgttttaactataacatagtaagacatttcttggtttcttatagcatctacttaggctaaagtatcgaataaactaaataatttctaaaaaaaaaactaatatcaacttcaatttaaatatacaaatgaaaatcccctttatcatagcgtcagattgaaatttgcagtttttatatgtgaacatgtcgcaaagtagtgataatctccagtataactcgttctgtgaaaatcttattcataacttcttgctcaatcaagttcatttcttccatgggatccaaatcgaacaacgttttagcatcgttctcatcctgtgaggttccatccacatgttgttgcaagtttaatattataggatccggttcagaaaaatcattgttaccttcggaattccgttctaacaatgattttaccaagtctgttttggatcggaaaaactctgaaattaaggaaatgtcagattgtatactttgagtatcttcaacactctgcagtaaattcgagctcacttcatcggtttgattatctaaccatctggtcatatcatcacccttggtgacatcatttgtaacttgaaaatccgtatggtacaccatccccattagctgaggaaaacctagagtgctaggttcttctttgtcgtggaattctatctctgaggaatgttgtgtcattattgttgcactgctgtttcactgctgtttcaccgtatttcttacctgttgtttcttaatcagtcagtaccaaccttttcgaagtaaattatggtcaaaagaaataattagttcattgttaactatatggctctttcgtttgaaccaatggtatttaaatgaaaagttctattactctgataaagttcgggaactgtcattacgtttcttaaacaagactactaaatcgacatttgtaaaaatacttgaaactgtaaagcccttactgcggaaactcttgttacaacttagaattatttgaaaccactacctgatcgtcagtacctacattttgtatagtagtttacagggtttcggtactatttcaaaattttccatcaaaaattaagaaatcttgacccttttttattctcttgacacaattttttttaagtaggtttatatcaaattacgaaggaaaagagcgttagagggcattgtgccttaggttcttgaaatgcagctatcaccatgaatatatattacgcatatttgtttgtaggacgactagttctattatagcgccattaatagtgtgttttcgggactaattgcaaaattaattagttgcctgtgccttttctaaagttccaccaacatagtgtattcgtggcatttactgtgccagtgaccatttcaaaaactgtcctgctgattttcctactgacagggcattcgttactggaaaccaaggatggcaatagctgaaatgctttgaaaaaaaattgaaacacagaagataagcaaaagcaaattttaaccaattagccgggattataagaacacaggtgagcttaagtccgttttgtattggataggaagagttacgtctctcaagttttttaccccatgttttccattgataagtatttgtaccaatataagactgggacgtatagtactctatgaaagtgtaattctctttaatagaatccagaaccaaacctcactgactatggcggaccgtaaccatcacgagttgccatgaacgctgtcctataagcaggttcattgcatcgtacgaaaactgaacggaacatctaccgaaacagcagaaaagggaaaaaaaaaaaaaaaaaaaaaaaaaatacgaagtccgccaaattgcataaaatatacatagaaagccaagagcaactgcaatgatgtgctttttaacaagatcttttaccggaattattaaattcagaagctgaaaggacagaatccagtgtttaatgataggagagcacagaaagatgtgcagagagatgtttttagttgctgtatatattccctttattcttttttctcatcactatacgcaaagctcgctcagccaatggtccacttgtatgcacgtacgtacacattgttacttatgttattagttgttttttgcaacggtagaatatacacacgagatatataaatataggttacggagactgccatgctattggtttttaagggtacataagagagtaaagattaaaaaaaaagctctgtgttaattcgctgctttaaaactgaacaagctaagtcagttacgttgaattaagactgtgtttcgtcagcgttttctaatcgatcatagagattaatttactggtaaagagtctttgcttttagttagtgtttctatttgttctatttttgtcaaaataagtggttgaacatggaactttcagtgccaaaatcttacaagttatctagtggctacactatcccatctgtgggtcttggaacctacgagctaccaccaaataagacagcttatcttgttcatcaagcattggaagttgggtacagacactttgacacagctgttttgtatggaaatgagtacgaagttggtcaaggtataaagaaatggctcaatgaaaaccctgctgaaaacaaacgaggagatgtattttatacaaccaagctatgggattctcaacatgggtatgaaaaggcgaaaaaggcaattgaccattgtttgcaagaggtggaagatctcggttacattgatttgctcttaattcattcaccgttaggtgggaaaaaattgagattagagacttatgaagctatgcaggaggcagtcgatgcaggcaaggttagatcgattggtgtttccaattatgggttccaacatattgaggagcttttgaattgggaaaaattgaaatataaacctgtcgtcaatcagatcgaaatttcgccatggtgtatgcgtcaggaacttgctgatttctgcaaaaaaaagggaatccttgtggaagcatacgcgcctctaacccatggcacaaagctcaaagaccccgatcttgtcaaagttgctaatgaagtaggctgtgacgttggtcaagcgctaatcagatggtccctacagaaaggctatataccattaccgaagactcaatcagtttcaagacttgccagtaacctcgacgtcttttcattcgaatggaccacggaccaaatggatcaattagataaaccgtatgcatatgaaccaactgattgggaatgcaccaatgcaccatgaacaagtcatataactccagggttttcttggtgccagatgccagccggtatttttttttttcttttggtgaaatcgttctcgtttacaacatcctacctcttcttttcaattcaattcaattctttatctgacctttatatcacaaatagctcataactttcatcaaattcttctctttaccttatttcactcaagatgcactctagctagtgatatatggtcgtattaatgcaggaaaagcgttggaaaccctatgaggctgcaaggcaagacctgaaaagagatagtcacgtggtagttagggtaatgaagtcgttctttttctttagcttttttctttaacttttatttctttttcaatctgccgtatataaggaagaaggtcgattctcattccgttcttcatagcataaacaatttcaattccaaatctaaagatttgagtcttaatagaccaacatattttttaaaacactcttccggattaccagctgtggcattgttcctccatatgttcacaacagcaaaaatggctggaagtagaaaaactggcggttcaacgctaggtttcagggtatataatctacctcgataggtttttttacaggcgagatactatatctggctatactatcttggtggttcgcttcctggagacatctcccccccccatctttctcttgtattgtaatgatatgttttttactttcaacagtgacatatagtagattcactttattgcctattagatctatcatcgatcatatttttgtcaatgtgacgactgtgtatagcaataggagggtgatcgactaattgtcatctccatttcaaaaacgtccgcggtggcactcatgaccttaccttgctatgaaagtgcgtttttgaaacatgtaatggaatctatcaatgcttggcatcaatcaaccttcgggtgatttcgacagtgatgagatgacactatcccaacctatgtaccgttccaaacaaaacttcaacaggtccggttttgaacgcggtgcattccttctttcttgatgtcagcccctaccggcggtatactgatcattaagattgatacgaaacaccgactgttatctccgttgtccttcattttttagatcagtactaccatcgaactaaattattcggcttttttactctcttttcgtcattatgaactctaaatatgatagtataatcaactggttgcttttttcgttggagccgcatagaaagcaacccgtcccacacccagctacacttaaacacagaacaagagcttagatatgacaaatcttctgtcacatcaacttgtctttaatatatatatatatatatgtgtgtgtgtgtgtatatgactatgttaatacatcgatacagtctaccctgttgatctattgtcctatgtgtaagaaacattattgactctgcccttaccaacattgcatttgacaagaattgtcttggcattattaagtatatgatatcaatgcattaaaggcacaaagaactcacttccagaaaaagtcatagatatgattgagggtgaatatagcgatgaaagtaaactgaaaactatggacgatgaagaatctcacgtttcagtgagttcatataacaatatggatgacgatgatgacgaggtattggaagaacatgctaccgaacctcagaacttgtatatggaacatgctgagaaaatacaaaaaactgataacagactagacgtgacggattcaaaccgccagctttccttactgaactctaccaaatctgagacaaactttgacggcattccttacacaagattctctaagcatgacaaacttttcctagtggtaatatgtgcgttgagtggattttattcgaccatcgctcaaacgatttacttcccagcattgagtattattgaaaaagaatttaacgtcagcgtgagtttggttaatgtaaccgttgtagtgtattcactatgccaaggtatcttccccgtgattatgggaggtttggcggatagattgggacgtcggcctgtggctatgttttgtattatggtttatttttgtgcttgtataggaatcgcatgctgtcgaacatttggagagatgattttcttaagatgtttgcaaggtggtggtatatcgcctataattgcaattaataacggtttaatgggagatatcaccgtaaaatcggaacgaggtggttatgtcggattgacaagtggtttccaagtgttgggaagtgcattaggtggtctacttggtgctttattcactgcaagatggggctggagatcgatcttttggtttttgtctgctggttccggtgtaactttgctgtttgtggttactgctttacctgaaactaagagatctattgtaggaaacggctcaatcaaaccacctcatcttattagcaggtctgtcctcttgggtgcaccatattataaaaaaaaattgcatttagacaatccagattatgaaacgaagactgagaatgcctcatatgatccattagctcctttcaaaatcatggtaagaccggaacttatatcgttgttggccgttcagggtttacaatttacaacctggatatgtcacatgacgaccctttctgaacatctaaacaaggattatggcctaccgatggtaattatcggtgtttgtttttacctgccggtttgtgtacgctaacgagtgttgttttagctggtaaattcttaaactggaattatagaagaaggttcgcgaaacataagaagttcatccaaaacgaaaagaaaatactcttagaagagaatgattacgattcacaattggttagagatatcatagaccaagatattcagcataagtttgatttatacaagaccagattagattatgcttatgtgcctatcataatttcaaatgcaggatttatcatttttggctggtgtattggaaccaaacagcatttagcagtcattttagtgatgtcaggtctcgcatcattgatgtgtaactgtatgatctcaataagcaatacgttggttgtggatttgtatcccgaaagagcctccactgcagccggttgtgtcaacttcgttcgctgtatcttcacagctattatggttgcagcgttagctaaaatgaattcatcaatgaccgttggtggtacgttcacctttttaacttgtttggcatgggtctgttctatgttactaatagtcccaatgaaatatggcttaaggctgcaattggcaagagaaaagaaacaaagtcagaagacactcggaagagagaatatagacgaaaataacatacatcctgaaatgtctgaagaagagagagagttgtgtgatcttcgtcgctctgctacagccctttctaatttatctgcagtgtaatagcgcattcatctgttaagaaaggaaattgcaatacatgcaaatacatatatataaacaacaagtatttgttcataggagtgctcgtgcattcaatttaattctaattttattctctaattcatgtaagttaaactgttgcgttatttgacctggctgtggtacgcatttcatgactaaaccatccctttcactatctgtattgttgcaggatgatctgtgcagccgatctgttttttctgcatcaggttgtgcttctctcaaaaaagaaatcatgtgtcataagagatatgaaataggaaaacagaattccaccatgacgcacatcagaaatactaaacattattatagatggtataaaagtcaaaagacaaagcagatctgaatcggtgcacatctgtacatgtgtactgctatttcaattcgttgttcttattgatttgttatccccatatttaatttagaatagaatttgagatgcaaagaaactagtaatctatgggattaaacagtaaagaatatccattctatttcattcaaccaaatcgctaaatcaagatatcaatattttggaatttgacggaccattggaaaaggattaaagagtattaattataaatcatttttcgattcgaaacgattctacaattgcaacattcatgagaagagctagtatcagaggaacggaccttcaggcagatactgaaacgaaaaagaagaactgcgataacacaggatctgaaagctctgtcttcaggactgtaacaagagaactgcgagatgacactgatgatgttgtgacgcatgaaatatatgatgaggaatctttccctgatggttcaaaacaggaacaactctcagaagaggatgtgccgtatacccttttaacgtaccgtcagaaatggtttatggtcgcattattgacttctgcaggcttctggtcctccttagggtcgccgatttactatccagcgttgaaagagttggaagcagagtttgatgttaatgaagaacttattaatatcactgttgtcgtatacttactttttcaaggtatagccccaaccatcagcggtggtttagcggatgtgtacggaagaagacctattattttgttaggaatgttaatatatgtgattgcatctataggtcttgcatgttctaagtcgtatggtgcggttgtgttcttacgttgcctgcaaagtgcaggtatatctcctatcattgccataaattctggtgttgcaggagatttcacagtaaaatctgaacgtgggacttttgtcggcgctgtttctgggtttactttaatgggccaggcgttcggctctttgattggtgcagccttgacagcggcatatgactggcgagcaattttttggttccttgtaattggatgtgggacttgtatgattattctgtgtttcttgctaattgaaaccaaacgtaccattgtggggaacttatctattagaccaaaaagttggataaatatagccccaataactcgtttgcctgcaataaggaagcaattcaaatatgataatccagattattcatcaagagacttatcagaagtgaagttcgatatcacctcagcaatgagaattcttatattgccagaaatcatcttatcacttctccccgctgcattccaattttccttatggactctttctcttgcttctcttccagcggaacttgcattagatccatacgactactcattgactatgattggtgtatgctatttaccctctggtatcggtggcttgttaggatctttctgtacaggaaaaattattgatgtgtattataaaaggtcccataaaaagttcttggagaagaaagaggcaggtcttatcgataaagatgcaagatttaatacctttaaggctagattaatttctggtgctcctcaaaatgtttgcgctgctgtggttttcactctattcggatgggcactgaagcaaaggtggcacattgcagttgttttagttacatccttcatcggctcgttttgtgctatgagtactctttctacttcaagtacgcttttggtcgatttatacccaagtaaatcctcaacagcaacaagctgttacaatttcatgcgttgcgtattgtctgcaattttcatggcatgtttctcaaaaatgaaatcatcgatgaacgttggtgggacattcacctgcatcagtggaatggttttcgttgggaactttttaattcttattcccatgaaatatggtatgaagtggagatatgaaagaggaatgaagctttgaatagtatacagatgttttataaacatttggagcaaaaagatttgattaccacattcgatgcttcccatttcgatgcacaactaattatagatcattaataaatatagcagtaattaacagactttgatagaatgtcacgtaagacccatcatattaataattctatttcgcatcatttactttgatgtagcatgtcagaaacttctgctcagagtcttttttgccatgaaaggtatggggtttttccgcacaaataagaacgctctataagaataacttcatgcataaattagcaaaggtaacaaactacgtcaacagtgcattagcagcaaagaaaaaggaaataaaaaatacgaatgaatggaaaccatgatatattatgataaaaaaagtgaaacgattttaccagaacttggatgttggattttataaatataacctttatagttgatgatagaatgggcaattcgcccaaaattggcacgacaaccactgcatcaccgataaaaaaagagaagaaaacggtaatatatcatagtagaggagtgaatgcggtagtgtatcaatttcaaaatgactagaaatgacaatgtgatgatagtatatttattggatggaatgtgagcagtgttgaagagaatacaggaatcaattcattttaaaaacagctccaccgaaaaaaaagatggtgaggtcaaataatcaaaggttgtatctcattgattactgtgaggcacattgaacaccttcagcaccgtggtgtccgtcttcatcatctgaatcatagctttggcctctgccgttaccaccagctctagcaccatgcttactggagtcgaagtctgctaaaacacaatcttcaacttctgcgtccgcaggaatagaaggtacatttcttggtggtagaatttcctcgagcttcttcaaggtttcatcgtccgtgaagtgtgcaggtgggaacttgatgttgaacttgatcaacaagttaccgtaaccaccgtattttggaattggcatacctttgccttctataactttaacagaacctggagagatcacttcacctggtacgatttcgaccttcaaatattcacctgatacgtgtttgacggcaaattgaccacctgcaatagcagatagcaaatcgatttcagcgtcgtagtgtaagtcgttaccatctcttttgaagactggatgtggttgttcagaaacgacaaagacaacgtcacctggaataatacctggagattggtcagcttcaccctggaaaacgattctttggccgtctttcatacctggttcaatgttgacttctaaaacctttctttcgtttacaaccttcttaccgctacagaccttacaacggccctttggatcgattatttcaccagcaccatgacaagattcacactcaacttggaatctttggatcataggacccatttgtctggttacgaacttgaaaccttgaccgctacaagcagtacatttcttaacactaccttccttaccaccacgaccttcacatgacttacagattaactgtttgtttaatgccagtttggcagttctacctttgaataattgttctaaagtggctggaatttcatgtctaatatccctacccttttgaggacctcttggtcttgaactaccgccaccaaagaattgagagaataagtcttcaccgaagccaccgaagccacctggaccgcctgcaccttggccagaaagaccttccaaaccaaactggtcatatacttctctcttttgagaatcagataagatttcgtaagcggaagtgatttctttgaatttctcagcagcttcttcacttggattcttatctggatggaattttaaggcgctttttctataagccttcttgatttggttgtcatcagcacctggagaaacccccaaaagatcgtatagttttgtatccttaaccatcgcttattatattttgtttcgaatgccctttaataattaatatatccgccaagatcaaaatacagtcttttcactaatttctgactgactgaatcgtaataataaaatgtctgaatgtaaacgttcaaaaaacaatgtagaaccaatatatgtatatcgatgaactctaaaaaaatcaaagaattaagaccttttccttttctaaattgcaaacgctaacgactgagatgttaataacgatttgtttgtaatcactattcttgtcgcagattgtgtttcagtaataaaaaaacgtaataataacgtcaaatgctcctaaacacgtagtcaaaaagatggtaagttaacagcagcaacctttgtaattacttgtccttgatgatccgaaaacagttaagttactaagctctaaaatctaaaacactctccgtttttgccacgagatgaggttcaccagtaagtttttctttaatctatgtaaaatttatattccttcgcatcctggaatttgtcgaaaaattgacgaaatttcgagaaaaagtaagaaaatatgtcgcttgagacgagttgaagttacacgtgatgacaaatgttggctcaattggctagttcgaatggctcattcaatacatatcagaacaagagcgtctttagcattgctgttattgtctgcttcgagttgcgctgagaagaataggaggtacttacataggctttcagcttaaatagtattcctggctctgatgaggcaggctaaccggttgttcgccacctgtgaggattcagggtttcttatttctgttacccgaacattatgcggtatgagtcgcactatatgtaacatccacctcatctcaactcatctcgaatcgtaattaccgagccgttacataaacaatcttatttcagctaagcagtgaaggcatgccacgaatatcaccccgaatactcaaatcagtagctaatattgataggcgcctgccgtatctgttattcgagtgtagtggtaatatttccgatgccaaacaagaattaagctggatcaagaatgaacttcaagatgcaaacctaataaatagagcatgctggcttagatataatcgcgtaccgctacagtatattttgaaaacccaacctttcggaccattggaccttttggtgagaccgggggtacttattcctagatgggaaactgaggaatggtgcatggatttaattgccaagttaccggaaaaggcacgccaaggtcaatttaaagttttagatctttgttcaggatctggttgcattgcattagctatagcacatacaagaacggaatatatcgtgaaatcagtggacctttctccgaaagcgattgcgttactcaaggacaacgtaagaaaagttggtttgcaaaataccaatgttcagtgcattcaggcagacattctgagacattctgagcatatttattcgaaagataaattcaatcttatcacttgcaatcctccttatattccttccaacaattttgtaaaagaatgcactacttcggtgaaattgtatgaaccaaggttagcactggttgccgatcttgaattttacgataacttactgcaatactggattccacgaactgagtccttcgtttatgaagttggtgacatgaaacagtgtcaacatgtgataaacggattatcacataataccagctggaagacagggattaaatatgattcgaatgataaacctagatgtgtttatggatatttagccaatccagaatctactatcgactatgtaaagatatttgattcgttctcaacctgatagtttagtttttacctatgtatgttagctttacctggtagatcataatacagaagaaactcgcaaggggattgaataaatattctataaagtattatacaaatgatgaagagccattatgggcttgcaagattctgggtttattacatttttcatagtttctcattgtcctcattcggctttcttctcttgattacttgcttttcctgatcaagcttatgagcatcttcatctccttcttcgtcagaatttttaatttctgatttttctaacgtctcttggtggagttttggttcagcagccggaagtactctatggcaccacatgaggtaaccaccgcctcccttcattgtcataagaggatgtaatttacctcttactgtttggtacggcctgcatcttgtctccaaaaggcttggtgctaagtagttcaagttttcatacagagagtgactcaattccagtagaggttctttatactgtgaataacacacgatcggacgagatccgtgtattttttctcccaatctcggaataagtgtcggaaggtacaaagtagatgctactaaaaggccatcaaatgaacttgctgcaacctcgatatttgatagttggttgtgataccatttaagacgacgaaagtaagcacttttcttattacttttcaggtcattgatttcttctgcagatagaggcttgaagagggacttaatatcagcttcctttgctggttcaaagaaatcaagcactgaaattgttttgacgtgacgttgaatgaagttgtcagaataacttgaaaacttcaatagatccaagtttggatgttcattctcatgaacgacaacaatcttaccgtttgccttggagttgctatctccagcaaacattctttcaagcattgcgtacactatgagacctccagtctcatctatgcataaatattgtccatttgagttgatattcgctaaattcaaagccatgcctaaagattcctgagagatgtccataactctcagaacatcccctttttcgatgaggtaatgcaataatccagagctatcaaggtattcaacagtgaagaatttggcaaatttctgcttcttccttttcaaatacttctcctgtgaatgaaccgtcttttgatggaaactcttatgcgattcaatcattttggagatgatagcgtcacctgaagcagcttctcgtttcattgcttcaatttctgccatagacatttcttgaaccacacttccaagatttatcaatccacggttattttcactgctattctccaatgccggcgaagatgcctttaacctattttccaacacagagatcttcccaatcatggtctgtgttcccttgacaaactcttcctccaccccatcatatacaatatcaaaagtggtaccaaatctgtagcctataatttcatttactctgaaagcaccaaatttacctaatgatacaatagcattggctttcaattcaacaatcttcaaattatcactaggcaatcgaattaatacatgttgattgggactaatttgtgttaacggatcaatcccggagtgtttcgtcattagattttttttgtgtttaaatcaaaccgtacctggtactgaaatcagcgggaaaccacactttattacagctttctcaaggatatacaacgtatacttttccactcatctcatctcatcttgatgctcatctcaatttttcattgaaactttacatcttgtaattacacacgagcaacatttctttttcactatttattcccataataaaattttctgtttcgaactgaaaagtgaaaaagctcatctcatcacatcgcatcgcatctcatctcatctaattggtgttatagtaaactagtatatcaacatttgtccagggtgttctcgtaagctgctgtgttgggtctgtgtgtatcaaaaccatatcttaaataattgaagagaaaagatgggtagcagacgtttaaagcataagcaaggtgctccaccaactttggaggaatttcaggccaagaaggaaagacatcagcacaggaaagaaaaaaccaagagagttagtgaagaagatagatctgatgagacaaggagaagtaagaaatccaagaaatccaagaagaaccaagaggatgatgacgaagcagcagctttgaaagagttgaaaaaagcggaacaagagttaccagaagttgattcgaaggaactagcagctgccaagaagactttgttcgatgatgtagaagaagatgacgaggagttgaaggatgaatttgacttggaacaagaatacgaaaatgatgaagatgatgaagtcgaggaacgtccattgttttctgatgatgaagaagctgatatggatgagttgaacgcagccaatatggaagctttgtctatgaaattagatgaagaggccaaattggaagaagaggaagccgaggctgaattggttgaaactgataagatgcaaccaagagctgaaatcttaccgaatgcagaacaagaagctattgaagaacaagggcctccagatttaacagctatcaggacaagaatgattgaaatcgttaaggttttggaagatttcaagactttaggtgccgaaggtaagtcgagaacagaatatgttgatagattgttgaaggacatctgtcattactttggttatactcccttccttgcagagaagttgttcaatttgttctctcctgctgaggctatggaattcttcgaagctaacgaaatcgccagacctgtaactatcagaacaaacactttgaaaacaagaagaagagatctagcacagaccttggtgaaccgtggtgttaatttacaacccatcggtagttggacaaaggttggtctacaaatatttgactctcaagttccaattggtgctaccccagaatatttggcaggtcattatattcttcaggcagcttcctctttcttacccgtaattgcattagatcctcaagaaaacgaacgtattttggatatggcagctgcccctggtggtaagactacttacatttcggctatgatgaagaacactggttgtgttttcgctaacgatgccaacaaagctagaacaaagtcattgattgccaacattcatcgtcttggatgcaccaacactattgtttgtaactacgatgctcgtgaattccctaaggtgattggtggttttgatagaatcttattagatgcgccatgttccggtaccggtgttattggtaaagatcagagtgtcaaggtgtctcgtacggaaaaagattttatgcaaattccacatctacaaaagcaacttctattatccgctattgattctgtggattctaactctaaaactggtggtgtcatcgtatattctacttgttctgtcgctgtagatgaaaacgaggctgttgtagattatgctttaaggaaaagaccaaatgtaaagttagtggagactaaattagctattggtaaagaaggtttcaccagttatagaggtaaaactttccatccaagtgtaaagatgactagaagatactatccacatacctataatgttgatggtttctttgttgctaaatttcaaaagactggcccatccaagttcgatgataatcaagctagtgcaaaggagaaagaagctgctgcaagacaagaagctgttgaagaaggtattattaaggatgactttgcttcctttgatgatgaagatgatgaaaggtacatcgaaagatcaaagaaggttggccttctaaagaaaggtataaatccacacgcgaagaagccagcttcttctgataaaaacaagaaatagattcaacctctcaaatcatagataatctctggcatttataattaaataaggatatgcatgcaatccttaactgtacatttagtttagattaagaatttatatatatttaatcttacattctttccaactttaattagtcgacaaatcgaacattacccaacttgtgttctttgatataattggggccaaactcttcatactccactttggtaacgcaagtacttgaataagtatcgctacgtgcaaactttgccatacccttccacgcatcaagcgagacgttttgagcatagtttacattcaatggagtgtttacaggtaaaaatccagtgaactcattcacaattctttcgcgaagattgggaattttagtattaccaccggtaatgaaaatgtttgatgccatatcaaggcattgttgagataatttactcgaccctgatccgaactttttagttaatattccatcggctaactcagcaatcccagcttgatctagaccacccattgagggctgaaaaatgacttcaggagctcgtattctttcaatatttagatgtaattgatgttgttgatgaacatcttctccattatgaggacgaggacctcttaagaaaagatggaggacggaatttctccaatcatactgcgcatctagggtgtcttcttccgtgaatgatggatcaaactctaacaaagatttctctagttccacaatctcccggtattcatcttcgatggattcgtctaaagcctctggtgtgattgctatatcattatagatagtccagtcatcgtcattcgcaccgaaagtgtcagagggatcgttatctatagtggcctgtctagatcttttaccgggaccaacactgtcctctgccaaagatgcaagattcttcattcttctttgagtagcttgtgatttacggtccttcatttcctccttcaacttcaacttgtcctttctacttttgatcaatttcgcgagtttgaatcttttgtcccttgtccaccctttcaaatcttgtttccgccaatcttcatcctttttcttcgcttcttccaatgccttttgcaattgtgctttttcctcttttgcctttaatcttgcttcaatgttagcctttaatagcctttgcttacgtttctcctttttttgttcatcgtttagctcttcatctgggacatccactaaatcaaatttggactcctgagattcttcttgatcgtcgtcttccacgtctaatatacggcctcttttcaaaaccttttcaaggtttgagatgtagttgataaagtcttgttcatcgtcaaatcctgcgttctgtagagttattaaaatttgtctcttcggttggtcgcgcaattcttctctgatattaacataatactcatactcttcctctttttgacgaagtttttctaaccttctttgtttggcttgttcttgtaacctcttaccagtctcccttcttttttcagcttggattctaagttcttcttcggtcttttgtggttgtataacttctgtgaaaggtgcttctagtacaatgtctttgttttccaaaacgtcaagcttgaacatgtcactaacttcttcctcgtagttttttgcaaaataacaatgattctggtacattgactggaaatgataatcggttaatttagaaggaaaatacggatacttcaaagataagaggctctttagataatcaattgattggttaccaccccagtcaatcctctttgcttcggagagtatccctttacctttaatgacaggaatgatgttggtatcctcgtggccactatttattattaacccagttgaatcaggtgaattatttgcatagaatgaaaaaagtccatctattccgaaagttacttgcggtattccgtagcattcaaacagtagctggtaccaattcgatctttgagcttgcactgtagccatcttttcggtaagtatcatgggattcgaaattccatcattaggttgaacgccaaggtgatggaaagtataagatagcatatcttccatatactcccaattggtgatcaaagacccatcatatggagacctactatgagatcttactgcattgtcgagactacagtcatttccaatgaacgtcaatgccttttggatcttcctttccttataccttactatcttcgttgggaaaacatgcgatggggtatcttgtgaagtgaatccagcccgaacttcatacgagccgaaatctaatgcaattggggtgtttggattataatcattaggatcatcaaaaggttcaggctccgtagttaatggcgggtcattaagcgggtatactgtcagtggttgaagactagaatctcgagtgttcgccgtcattgttcttgattacagttcaaagaaatagaagagaagaaaaaagattagatcgaccaaattaccgtttttcttttcggactgagaggcaaactttggttagcagacactttaaaccacggttactgctcgacggctcgtttcttgataagatactcgacgatatatgaggccaaaacttgcacgtattctcccattaagatcattgacgagaccttaatatttcgaaatcaaagaaatcgatgttgaatgaaggttattacccggactaaacagctatctaatatacactacgaaataaaaattgggtcccattaacaccattcgaaatctctgctctaatccaggtagtgtcagcaatagttgattcaccatagatcttgtttggccttccgttaatccaatgtatcccaattctttcacatcaataagtatttattctccatttcaacacccgtacagcacatattacattcctcttctcggtgttaaagtttcataatcagatgagaaaacaggaattcatttcaatttgaaatccaaaacctgaacgcttcccgcaacacatagagaatacacatagttgccgcgaatagtaagcaggataccggcagtacagttagtgagcgagtcaactttctagtagataaccgaggttcaattcaggtgcttgagggattgtggtgctgatcggttcaaagagcggaagttccaagaaattttcttttttctggttttatatcgttgttaatttttggataaggatttccaaaaacaagatgcctctctgtggtggttcttcaagcaagcagccaattgagcgtaaaatagtcatattaggagatggtgcttgtggtaagacttctcttttaaatgttttcaccaggggatatttccctaaggtgtacgaacctaccatctttgagaattacattcacgatatatttgtggataatcagcacatatctttaagcttgtgggatacggcaggacaggaagaattcgacaggttgcgatcgttatcatacagtgacacacatactattatgttgtgtttttcggtagattcaagggactcgctagagaacgttcaaaataaatgggttggcgaaatcgcagatcattgtgaaggtgtgaaattagtacttgtagcgttaaaatgtgatttaagaaatttggaagagttcgggaacgaatctgctgccattaccccaggctctattcagaacaggaatagtaacgctaaggataatggattgattagttacgaagaaggtttggatatggcgaagaaaatcggtgcattgcgctacttggaatgcagcgccaaaatgaatagaggtgtcaacgaggcattcaccgaagctgctcgttgtgcattgactgcaactccaaagggggcgaatgataccatccctcaggataaaggaagcagttgtattattatgtgatcttataaaataacaaactacacttacttacgttaagacggaatagaataccaggataataatgcagtaacggtttacttcgggagaaaaatgaggggaaagactaacatgaatatagctaatgttttcgcttcttcttcatttcaaaattggcgatgtaactattgatattgatattccacctttaagccgattttaattcttgtcaattgcttcaaaccttaaaagagggctagtcagtgtattgtccatctgttcttctagattcacaccactaattgcagttcatcgcattgacatgtgagacgattcatcatcttcaaattttgatgatcatgatacatatgtatatatatatgtagtcttttcctccacgaggaaatctgttgatatcttattataagcttttgttataaatgcttgcttctatcagttgatgtgatatttctaggtattgaaacttaaagaggtacattgtctatatctattttaatttaatgttttacgtactgaactaaaaacaacattcgaaaggtagtcattgtttcatggccctcaatttgtaaaataatattggtctacgaattgtcttctaacatgttatccaaatacactgaaggagtaatagaagatgatttattgtgccctttacttctgccctgtcttttttggttatcgagagtagtggaagctgttaaatcaattgttgaatccaccaatttgctcaaactggatttactcttttcatgcttatatgttcttctttccggagatactgtgcgtgttggttccatcatctctggtgtatcgatagagactgctgattggttcaagttattgaacagtgtcgatctccgttgttggttcataacttccatcgttggtgagatgtataaagatttcctcacacctgtattggctgcatcaatagcatctactctttccagtggattcatagatcccagattggtattaccgatagatgatggtgttcctcctccgaaaccatcgtcggtggatccacctaacagtcgaatcatgctatgagatgccctcttatacggagtaaacgaattgtttccgccatttttcgtaggcactggagtgtctttgtatgtgctaatatcctcatcagctttatagtagccaccacctgaactgaaatctatatcgtctatgaaaggattttggaactgcttttccatattgttaaatttctttagctgtttcgcttgagagtaggacatccatgtgttgataatgaaccatactaacaaagctaaaaatatgaaccctgcagcactaccgacagcaataaatacagttcccgttggtttatttgatgaccatatgttagggtttcccttagctgatggaagttccatcaccggggttgtataagatgctgtttcagtagaactagttccggtacttgtggtcaatgtacttccatcggtggtcttagtcgtcagactgggcagcttggtatttttacttgaagtcccggtactagttgaagtgctggtactagttgttttatcatcgtctgtattggtagaagtctgcttagctgtcgtttcttcggtacttgtggtcagagctggtagtgctctttcttccaaaacgaccgcgctagcctcgtaatattccaagtccatcttcactaatttagtatccactgcttggtaccgttgctactgccaagaattcgacgcgttaacccctgagatcaggattgatttcagtttgtcagtttgttctttgtttccaattacatttccacttttgtgaagaatctcttacttttctgataatgaagtaaatctataaataatatcaaacaccaagtaagaaaggaaaaccgattcaattagagacagtctaacagaatgtcattactgtgtagtagaggataacatccgatatctctgtattcctgtatccaatcatttttcaactgaaagggtttccaactgtttgttcacctatttgtccctatgaagtacattcctccactaagttttgcaccggtcgtgggtacggatgttgacctatacaggtcggggtatccgatgcccttgaactattcgttcataaagcatcaattgcatttaaaaacagtgatatacgtcggtgacaaagatattttgcccgaatacaaagcgtttttggaagaagaatccatcaaattccaccatataccgatgaagtctacgaaagacccagaaatacaaaaggaaatggaaactgtacttaaactggtgttagacgtaaataactatccgattcttgtgcattcaaacaagggcaaacatcgtgttggtgttgtagtcgggataattaggaaattattactcgggtggtccatgacaggcatatatcaagaatatgacttattcactggagggcaaaagggtgatattgacctagaatatatcacaatgttcaacacttcgattaacgtacccctggacagattgcctgatttcgtcaatttcaagaatcatcctaacgaaacccatgaaaagctggccgtatgatacggaaattgcatgctcagctattcctatataacacttgtttgtttgattttcaatagtatacttctacaaatatagattctgactgttttggtacttcaatccatcgcagctctcatgctgcatagtcaaatattgttgtttatttcttcatgagtcatctcatcccatcttctcaaagtcagatttacagctcatccagactctacagggaaaatgaacattcataaaaagtgaaaaaatacgagaacgttttagacgtacaactcacagattaaagttgtcaattgatgggagaaatgtacctcctgcagccactacatactcaggtacagcgctaagagtgttcaggttttgttacacgagatgacttttgatatagctaaagttgtgaggccaaagattctgaacttggagccatatcgctgcgctcgtgatgatttccaagaaggtatcttgttagatgccaatgagaacccatacggacctaccattcaggaatacaatgttgactctctgttgcatcgttacccagatccgcatcaattggagtttaagaaactcctttctgattaccgtaacaaaacctctattttcaaagaccagaacttgaagcctttggatgctgacaacctatgtcttggagttggatctgatgaaagcatcgatgcccttattagagcgtgctgtgtgccagcaaaggaaaaaatcttaattgcacctgctacgtatggaatgtataccatctgttctcaggttaacgatgttgaatacgttacggtaccattattgttatctgaagaagacaaattccaaatcgatgaggaaaagatcttagaaactttgcaaaacgatccctcaatcaagttggtgttcattacttcaccaggtaatccaactggtacctttatcgatgttaatcgtattgaaaagattctatcacaatggcaaacgggtcttgttgttgtagatgaagcatacatcgattttgttgagggttctgataaggggtccttggcaccgctagcaacaaagtacgaaaatattgctgttttacaaactctttctaagtcatttggcctagctggaatcagactaggagttacgtatacatctaaagctatgtcaagagtcttgaattcgatgaaggctccttataatatttcttgctcgactgcagaagttgctttgaaagcagtacaaccaaaaaacttgaaattgatggaagagaatgctgccacagttaaaaaggaaaaattgagagtgttgaaggagttgacttcttctccatatgtttcccaattgggtggcctagacgctaatttcatcttattaaacatcaacaatggagacaacgctttgactaagaagctatatgaaaggcttgccgttgaatcagctgttataacaagatatagaggtaatgagcctggctgcgcaggtggtttaagaatcaccattggtactaagcaagaaaatgatgttctaattaaagagttcaggaaacatcttgctttaataatggcttaattaaggtttgaaaaggtggatgcaagcaattatttagcgtattcaactggaccatttcgttctacacattacgtagacagtttagatgagaaaaaatctcctaattgagcccttgtatataactccaaagtagtttcgagaaggggcaacgatgtagaagctgtgttaattaatagattctcaggttctagttggtttggtttttctgccgacaattttaacacagaaatttcttctcttaacgactgaatctctgttaacaagttttctctgccaatgcctccgtttaatgacaattgctgcacagcatgcagtgcttccttggtatttgtaagattgtaaagctttagtacttgaatggattctctaatttcatccagtttcgaggagacttcttcaagtttcctctttaccatagttgagatatgatgctgactccaagaaagtttcctgttggaatgattagatgtcctgttggagagttcaagaatgtcatattggcgttttagtgtcgtgattagcatgtcgaaattagttaccgcagaagaactatctgctaacctttggtaagactgtttcaattcgtagctttgtttagccttggaagtaaggatatccaaaagagtggccgcctcaccaagtctccaggaggagacaattgggacagttttctcagtacgtttgaataaattttgggaatggtcacctataaacttcccaatgttgtcgatatttgagcgtaacacttgaatgtttgctaaaacttgagcatttgttttttcaacggcctgtacaacttcatcggaagatattgtactgaattctttaagttcagcagtggaatagaaagcactaggcatttcaggaagatacctttcagctatatattgctcatcattttcaaaggcttgtaaagtaaagtctgcactttctttagtaagactttgagtggaagcgcttcctacaggtacactcgcttgcacatgctgtgaaacatattcttttgtagtagtaccggatgatttactcattttgactggaggataatctaccacaactggtgaagaagagacgctaccagattctggactgacagttgaagatggtacaatttcttgatcctttgaaagtgcttcctttttctgttctgaacttgcgaggttagtagagggagttgccacttcggggtccggctcatcaccagttttctgttttaattctggttctggctctctcataacactttcgttgctaatagaattgacattagacagtggtgaggtaatttcagaaccatccttcttgagattggcaaaggaaaatgcgggagcctttcctgtatctttggataaggaatttgtgaagcccgaaaaaggtgaggaatctttgttttcaactgctgtggatttcatgaatggattggcaatattctccgttgagaggttagccgctttctttatcctatcggtaaaagaagcaacagacgatctggtgtcatcttcctcagtaacgtaagacgcagcaacaggggttgtgctctccgccgatgggaaagatccttcagtgagcagatcacctttgacctgcttatcatttcctttgtcttcttcttgctttttctcctttgatacatctttagtatcatctttcacttgttcttcatcttgcgcttgctgctccttctcctcttcctctccctcctccttttcttcttcttcttctccttcttcttcttcttcttcttcttcttcttcttcttcttcttcttcttcttcttcttcttcttcttcttcttcttcttcttgcccatctttggtctccacttttgcttgttcttcgttgctttgctcagcttcatcctcttctatgtcactgtttgagttcaaaacagttgaagaaggttttgaagaggcttcgatgtgtatatcagatctatcattatcatatatttccctgtcctctccgtataaggaatcactttcatcggtagaggatacaatgttagattcgatatcgtcttgatcttctgaaatgctcgaatcattagctggactaggcacttcagattgatcgttttcgatcgtcgaatcgctgacttctttcgaattcaaagaatcttgagtgacggatggcaaactgtggttagcttctgatatagattcaccgaaaccagtaaagttgaacgacttagtgtcttcttttttagaattcaagtggccgaatggatcagaagtctgagtttcgaatggatttatggtcttttggtctgtagcaaaggcagaaaatggtgaagacaatttcgcagatgtagcgaatgaattcggtgcagggttggtaacagcgctgtcgctgccaaactgagaagttccaaagagcgattttccaaaagacgactctgatgaaatttttgtgttggttccgaatggagaggtaacattagctccttgtattccgaaagatgtggagccaaaacttggcgttccaaagacagatgacgtctctgcctcttcggacaagggtgaagtggtattagtttgagattgggtaccaaatgatgtacttccaaatgttggtttgccaaacgctggtttactgggcgccgattggtcagatacaggttggccgaatgctggttgtccgaatgctggttgtccagacgttggttgactagatgcaggtttaccgaaagttggtggaccgaatgctgcttggccgaatgctgattgtccagatgttggttgactagatgccggtttcccaaacgctggctccccgaatgctggttgaccgaatgctggttgaccgactgctgattgtccagatgttggttgactagatgccggtttcccaaacgctggctccccgaatgctggttgaccgaatgctgattgtccagacgttggttgactagatacaggtttgccgaaagttggtagaccgaatgctggttgaccgaatgctgattggccaggtgttgcttggctagatgttacttggccaaatgttgcttggccaaaggcaggttttccaaatgcaggagatgaaccagatgacagcaaaggattttgagagccctcagactcagcatttgtactatccgtcatgttcttcggagtgaacgaaaaacctttagcgaaggaatttgtagtttcaaaaaatgacgattgttcaggaacctttcttacttcagttattgtgttcttagtgtcttggggagaaattaaagtaactttttccttttccattgaagaagaaccactttctattttatgagataagatttcgaaagactgtacatactgagttttggttggttctagcgtgaaactcgagttttgtaaagcagagtgatggaataaagcccaacaaaatagttccccaagattggtgaggacatataatatcggtagattgtcagcagcctctactccggaacaaggctcatacacagtaccactggaaaatacatctagggccatcccaatgggttgtgtatcattatctgtttcagggttgattggaagaattgcacaagcagcatcttggtccggtttatacatcacgttcggtgtggcaatcgatagctctgatgcacacgatgatcctataacgaatagatgtggtagctgctgagcgagttgatacaatgtttgagagtagtatgaaggatttcttttgactgttgaatagggaggcgcgatatccatggaaggagtaaaagatttagtattgacattgacaaaatatacggttaaatcgtacatgatatcttcttccgaggcatcgaccggttcgccgtacgatacgagtaaactgctttctgacaaagcgtttatggacaacggttcgttaggttcatcgagagatggcttttcaatagaggatgtgacgttaaactgttcatccagtacagctatagaaccatttttgtgtaaaacataaagttgatgtttcaaagtgtcaattgcgatgcaacctgtgattgaatgtaactgttcggaagaatgcttttgcgataaggatattttaaacacgacattagcgttactcgcaagaagtacattcccttggaaaattacagaacaaatgacttcattgacaccattaccgtcccagtattgttcccaggcgaattggtccaattcggtaacccatactgaaccatcttctaggaccgtagccaaactctctgccacaaaaaaaacgcccactactttcgccgtgaactctttcgtatttagagtgatgaaggactcatcacggacagattgcagatcatatacagacacagtcttggaagaagcaacagctagtaattttttcaacggatgtatggaagcattagccagttttgagaatggcaaatcctcattgaagcctggaacaatttgtttagagaataaaaacttgaatcccaagctctcagtagtttcaacattcaacgcatcaaccacagaggacgtcattgattctgtatgtgttcttttatctgtgccgacagtagtagtttcaatccgttagtgtattaatataaacctcagctgcttattaatttgtaaaccttgaatttcaatgggcatcagttgcaatgttcagtgcttgtacaggtttgaagctttttgatgatagctttgaagtaaacaaagttccaaaaagaaggaaattatcaatcacgtgatccggaaatcagtatgaggttagtgttcatgttttattgtctttactatgacatgaatgttttgagatataaaattttttagatggtcattaaagaatacgtatttagttaggtaagtatcttcgaaagaagtaggcgttaacattgtaattgaggccatatctgtaatgaaaacaaagcggatattgttgttctgaaaaaaaagcgaacaaaatgaaaggcaatatatatatatatcggtatcaaatggaacgccaagaagaatgatactttagttgaatgtgaatcatttcaaaattgataacctaggctggtgatccattggacaaagcaaaataacataaacttagaaaaaagtaacacttctttttaacacttgtgtaaaattactaagtatgcatttaagcagcgaacgatagagaccaacccaacttgtggactggttcagccaacttcaaagcgtcgaaagaagcaccaatacctagagtgacacctggtctcaatatttgttggtaggacaaggcgacgataccggagtcagcaaccttagccttaacttgagaaacggcgtccaaagcgtacttggaagcgaattcaatgttgacattagagccagcttgagggttcaaagcagccttagcaccgacttgcaagattggggaaaccttttggaagaaggaagcggtgatcaattgagcgttgttgacggacaaaccaacggaataagcaccagaagcgttgtaacccaaagccaaagcgtaacgggagacggcaccagcagagatgtcataaccaacttcagcaccaccaacgaaaccttcgtgagccaaggtcaagtcaccgacgaaggatggacccttcaacaaatcgaagaaacctctagcagcaaacaaaggttgaacaaagttaacgttcaacttagcagccttagagacacctggaacaccagaagtgatcaattcagtcttcaagcctggagtcaattcagccaattcgatcttggtgtccaaagtgttggcgttgttccaaccttgggtgaaagtcaaaccagtagacttgtcagaggccttaacttcaacgttagcagcaattgagccatcttttggagaagttttacccttaacagtgaaagcaacaccgtttggagcagtggtcttaacgtcaacagaagctggggtagcgtggaagaattccttgttcaacaacccattgatgtccttggaaatatcagaaaagaatggaggagccattgtaaatctttgaagttattttttgttagagggcggaagcaagctttcggaagtgcgattgatctaaatgtgaatcaattagagttcagtcaaccgctaaaaccaagaaggaactactacataacacaaaagcaagagacagacaccattttaattcggtgtgcatccaagatttttcgcaaatttcccaaaaaaaaatatctcgatctctttcatttatatataatatcgattttataaatacaaataatgacaatgtgaacttttctcgatttttcacagttttcaacaaaaataccgtgtagccagaaaatgtaaacattggaaagcacaaggcttcccaagtgaaaattataggggacgagagatttaatacagtgggaacgcacgtctatagtggggtagcggggactgctatacgcaactggagagtagctcagttttttgcctgaggtgtcgttttaagagcggatgtcggactaactcactttgagattctttacgcacttgctctcgagcatatatcttgtagattgtacatactgcatacagatatcaatcatttgaggctaaataaaaatggctatatacaggttattgatggaagtgtatagaacacgttaattggactatcatgttgcaattattgatagtttgggtctacaccccatgtgctttgtagtcttccctatttcagtttgtcttaatctatcactccggcactcttgagagctctacacaaaaaccgaaagaaaattaattaaaaaagagaccacgtaatgattgacaattggaggcgactcatttgcgccggatatatctggaatcctttcttgcattttgatttccgacttttattagtgctgactcgaagagacacgcagtgggaccggggtgatgacgttcgcatttagagtcacgtgaatatatcgctatgtacgcaacaattttttttttcttccaacagaattgtgtatgtgtgcatctctcctctttctagtttggttttcacatggcggaggcaagattctccacttggtgtgtagattttcttgttaaacagtcacgtgaatatccgagaaatcggtcctttgtctcatataccggaaaaacgaaaagttatcatgaaaactaaacttcgagaacaataattaggctttataaaacgaaattccactttgagttaacaatatgaaaatgcagtttcctagtagtagaaaatagttagatataccttgaaactgaaaatgatgtggtagtattgtcttttgaaatataatggcgaatagcatcacaccagtgacagttcacattcgctttttgacagttgacgactgcatctgtgtttgttttccgaagtcatgatgaaaacctaaacatctccctgttgccctctaatcctctgaacggtattcttgcatgattgaaaaatacgtagtgtatttttcagttcagaacttgtcgtttgagtctcaggaatatgtaccatgtagagaaatataaagcaaagatacattacattgtggaccagctcaagttttcttgacaatactgaggttacggaagatagtgttgtggatgaggaattacttttgacctgttggaatcaatcaaagttttcgaaagaaatgctgaattaattcattcgaagttcgaaaggatatttcacacctcactatcggagttcaaaaatacaacaggggttaatcagtcttaaagtattctttcagtcttagaataatgtccaagataatctttgttttgaagtacttccttggagctctcatggagtttagctggggcaacgtctgttgtattccaaaaaaacttgaaacggtagacaacaacaattgccacaaaaataccaactagagataatggtttattcttgtgaaaatatatttatgctgtgtagtatgaaattcatagcatatgctgcaagacataaccattagtgtttcgacctaaataaataaaggtttaacgatattctgtcgctctccctgctaaaaaaatctaagaatatcatctctacttaaaaaagctactagcgcacatcttacttatactataggctctagccagttaggtcgacaattcgctggtcaacaatatatatatatatatttatacaggaacctaaaagttgtccaatctcaattggagctgcaatcacgtgaccattcggactctgtatcttcttttagtcaaatctcccaaaatgacaagagcaagtccttctaactgctgccattcacgggagagaaagaggacatcttgggaataataatactcttttatttcgcatatttctatcccaactaggcaatcagatcggcactacagacttattccccagatcccaactattttgcttcaaagatcattgcttacaaaaaaagatggaaacccgaaattctcttttagtttttgtttctggtaatagttaccacaactttcttcaatagcctaacaacttaatatttcaacatatataagatacttatccattagaattaaaagtgtatgacaccaagaattattagcaggtgaccgaattcagagaaaacagatagtaacagactgcagttctagtgctatatccagttttgacaataatttttgtccgtcatttagttgagtatctaataattatcacataaccttgttcctcgtgttagtctgattttgataccatggttgcaggtttggggtcagaagatgacggtaataagatgatagtggaaacggaactggttcaaacggagaaacagaacatacttccagtatcacaacaaccttcacaacaatttgataagaatggcatcggcacagatactgagaattcgacgttaacgcaaaagaaactacttaataatacgaaaagggataccatgcctggctctccaacgagaaaggaaggtcacgatagaatagatacacacgatcttcacgatctccatgatgatatgagcgcaactctgaaaccacatcaaagtcagaatagaatagcatcactacagctgcaagattcaacacatcaaagtatcactagccatcaggaaaaagagggaacgccgttatcgcaccaacacaccaatccattatccactcatgcgttgtcatcgacagggttaaggaataagaaaagcagtttactcatcgactgtgctgtggacggggccagggacttttcgttaccacctcttacgaattctgatcagatgttggacctatctcttgtgtcaaaaaactcatctcatgatctgccctcgtttactacagcaatgtcaaagcagaaaactaagccccaattgagtaaactttcatcgtatcaagaggagtcatctgatggtaggattgattcggattcgcagttgaccacttcacaggactcgaaaactaaggaatgggagcggagacaaggaatacggacatcaaactctccgccgcctcaacagctggcatctcagatttctttgggagcaggtgatatgaacggcggaagtagcgcagtactgccatcatcaggcgtgtctcttcctttacagcaacagcaacaccagcgatcacaaacacaaggcttgaataatcccactgttcaggtccagtcagcatcagcaaatttgactccgaatgggcaaatatcgctgccaacggtcacagattcggaatctgtgcgaaaactcaataaggaatcttcatcaaaggccgatttttttgctgcccggttggcaacggctgtcggcgaaaatgaaatatctgactcggaagaaacctttgtttatcaatcgacggcaaattcagtcaaaaacgcttcgataaacgacgtatccgcaacaccgaataatactatcaactccatacaaaataataacaacaattctaagtcctatggtatccctgcaaagttaagcgctcctcaattgaaacagaacgataaactactaaacagattgaagaacacaagacacacaagtatagcagcaatccctaattctcaaggacctccgtcaagcaattctgaacaggatgatgtagcgtctttgagatcaatcaatagaaacactatgcaagaaatgcaatctatcaagtcgcatcgaactcaaatgtctgcctctcctaagaaacgtctcagtatcacttcacttcaaaaggtacaaaacaggcagcaaaaacagcaacctcagtctgttatcacaaatggagctacaaaatcatctacttcaacgactcctacaaaatctacctttgcctttgggcagccaaaaagcggaaaaaccacatcaagtataccaaaaaattccaaacaacacttcccgcaacctatgcttcctctggctcagaataaagtaatgcatcaaaatcacagaagaacttcttcaaaaccaggcgattccaaaaaatctgctttgaggacaagaagttctaaagtctttgatcctaatggttcctcactacgtcgttattccggagttcctgatgatgttaatttagaagactttgtagatcaatatgatggtgaatttgatattaaaatgcatagaccatccaggacaacggaaaagaaatcgaacaaccaacagcaccaatccaatgctgcttctcaacgtggaacgtactcctccgacaaccatattcaatatgaaccaaatgataaccatagtggatatggagatgatgaaatcgatttggataataacgatatccaatccaattcggatatcagtgatattcacggactgacatatcacaatcaaaccaattatgatgaacattcgtacgcggacgaagatggtgatgatattgagtcgatgttttactataacggaggtagcatagttcctaacaatgctagagttggaaggaggttctcagaactcgacgatggaacggaagatgtagaatcacaaggatttttctacggagatccgaataatgcagagagatcaaatgaaggaaagggacttggttcgtcccaattaccttatttcaatcaagccagtgagtatactcctttgaagaataaaagagtgagcaggaaaagatctgatttctacggtgatttttctccccacaacttttacaccaagaagggttcatggtctaagtttaaaaatttcgtttacttctctttcatcgtggcctccctattgactcttggattcatttctggattcctactggcaaccaacaaagaattacacgatttccaattgttggccatggataacgttctagtttcgttggatgaattagtattcgatatcacagcgactgcgtttaatccaagtctcttcactattggtataaaagacgtggaactagatatatttgctaagactaagcacgttgacgttagttcaaatgaagacaagttatattcaactccataccaaaccatactactcgggacagtatacaatctcgaaagtgaactacaatttagaggaagattgatcaacagaaattatgatgtttctgttgccagtgttaaattgctcaatcctggtgcacctaaaaataatggtgatgatgaagacggggataatgacgatgacgacgatgataatggtaacaaaaagaaaatgggccacgataaccaagatgaaaagggcaatcacaaactagagaatgatattgaccgttggaaagaattgatcaaatatgaattcgaattgatcgtcagaggaaacatgtattacagtatcccattctttaacaaccagaaagtactcccagtacaacagcaaatttctgtagatccagacaactcacctttcagaaaaaagcatggaaataaccatgcgcaatagaatataaaggccattttttagtctgccagaagcttgtttaagtcagacaccaagataactcatcggaaaacttcaaccttggccttacttagtttttacaatgtcttgtagtatgccacagcaactaatttgcttgtaattatatataatgataacaataagatatacttaaagtaccacaaactgtatttttcatggccgagttataagccttaagtgaccccagcaacatctgcatcaagaatgttatttatttacttctttttttaggacctacctgtgtccccaagaaaaagtaaaaaaagcagaaatgttgaaatactaagcacaagaagtaaacttgaaacaaggtaccgaaacagagctaaaagttcatttgtctgtttttatcgtcaaataaatcaactgctgtaggtccacaagttatcattgttattggcatagatttaaaccttcgaattgcacgccggtgggttttcctcgacttaccacacacacattcaaggcggcagaggggatattttgaacatattaacggggaacgattgtgagatcttagctactacattagaggatatttgagaaaagcttgtacagcaatttattgaaattattgaatattgtgttacttcaaagatataggaaaactaaagctggtacttgattatttccctagacgctggtaacccataagaaaaccgttcttatctcatcttgaattcctggccaaagaaattcggtaagaaacttatttggttataattatattaaacatttgatcatacttgcaagtccttttcaatacccaacaccgagcgatatggaggcaccgcagagaataagtacaaggtcacatcattcgatgcaaaataaaaattcaaagaacctttgtcttcgaataggtgattccccaacgaaaaacaaactaataatggtggattcaaaaccaaatgaaagcaatgatactttcgcagtgccattgcgccaccagcttactaaacgtgtaagtgaagcacagatatacactttaccgccacagcttaaatctgccagatccacaccctctacaccacaattaccgtctggcagttcgggctttgattcagccgcttcaccctcatcgtctacgtcttcctcgcctttcaataaaccaacacttccaacaatcaacaccaaatttcacaataggccgagggccacgacaattgcgacaagtgtacctcagatacagacgcccagtaatgattcaatggaaagcacgacacggtattgggttcttcaagaaaatacgcccatgtcctctacaaattatgataatgatatgaagagcatcccatacaatacccattctgatgaagactcaccgagctattcagaatcatacagagagaaatattatcccagtggaccgttacttgtcgtccctcctttcatatatttgtattctgaaccatcattaaaagaagtaatggattacgacgtaataataaacgttgcaaaggagattaccaactacaaggaacaactgcctctatccaagcaaggttgctattatcattttacttggtctcatacctcacaaattactaaaaacctaccacaactaacagaactaatacagaatgcctatgccagcaaaaaaaaggtgctaatccactgtcaatgtggagtatcaagatcagcttccttgatagtagcttacatgatgagatacgacaaattaagcttgaatgaagcatataataaattgaagtctgtcgccagagaaataagtccaaatatgagtttgttattccaactaatggaatgggaagattggcttaacaattgtgactcaatcaatgataactgtcggaaacagtcattcgagtccatctcggaattcggtgaactctctctgtgagattgtatgatataaaacgcaattttagggatacccatacaaagtatatagtagcctaaacactactctgtaataatacgccgcggatcttctgtttgggcaaactatcaaaacgtaccaagtgataattctgttcttaaaaacattaaacttttgaaggtttctaagttatgatataaggtaaataaagctggtgacaagggagaataatgcaaagaaaccattagataatactgtcctcccacttattatacttcggactttacgttactcgaaggattcattcagaagagtgcgaattatggaaaatcagaggccattcataactttcaaacctttctgaaaaaaccgagtaataaccatgagcgaacctgtcaaaaaaagaagcttgggcagttatctatctcgtctcgaagagagaagagaagaacgagaaagatcagagcaacagcagcgagaaagtcctaagccagtgggtgaaaatgggaattattctgttaccaatgttccagtaaaggaggaagaggtatctcaaaaggtaacttcaactgatcagaacagtacaaaacaaccatcagacgaaccctatgtcgttagccaagcaaacagctctgaccagaaagttggatctcctttgaataatcaagagtcaataccggtgagacaagcggaaacgaaaggacctattaatgaaataaaacaggaaacggatgtagaagaaaagaaaaatctaccgaaagtagggagaaataagcattctgacgaagaatatagtagtgcactcagtgaagttgaaagtgacgcaccgacagagcctgcatcgccaccaagaccaaaaatggggagactaatacgaggtgatcaacttgaaagcggaaacaacagtcgacaatcaagtgctccagtattgacaaatgatggggaatccgattctgatctttccgatttagatgaggctcgtacagctaaaatatcaagcagtgcgattcacgaagattcctctccggtgaaacattataatgaacacaagcgcaaatcctctagtatagaaaactcctccaatcacaagaagcaaaaacattctgccgggaaaaagataccgaagactaagcgtggagtacatagggatgccggaggcaggacaaaactacaaattgcttgtgataaaggcaaatatgatttggcaaaaaaacttattgaagaagacggctatgacgttaacgaccaagacaacgctggaaatacgccactacacgaagcagctctaaatggtcattcagcaattgtcgagttgctcgtaagaaatggagctaatgttaatattcaatcatatgatatgtttctagatacgcctcttattgatgcttccgcgaatggccacataaatgttgtaaaatatcttctagatcacggagcagatccaacaatggtaaatgccaaaggtctaagtgcaattgaatctattgaggaggaatcagacatggataatgatgatagaagaatagtgcacgatatgaaagatatgttaaagagagcaacgaggaaatatataaaacattcccatcgcaccttacagtctagttccatgtcaagacattcagatgatatagacaaacaactcaaccatgatgacgacttttattggactgatatcagttcaaaattgggtaaaaacaagcttttgaaagcttccaaagaggggaaattagcatacgtcggttcgtaccttgaaaacggtggtagacctgatttcagatgtttccttgagagttgcatatatggtcatgatgacgtagtaagtttatttttagcctttggcgcacaagttaatatgagtaacaaagaaggtcaaactccgttgatgctatctgtcgggcgtggacatgtcaacgtcgtgaaacttttactcgaagccggggcggatccacagaaaactgacaaacgaaagaaaactgccttgcattatgctaaccacagctctcttggtctaacggatcctgatgaagtgaatttactcaaagcagcggtgagggcaaaatatggatacgaagtttcaaacaacagcgatgaagagggggaggaagattctgaagggaaatctccttcacctagagaaatatcgtcaattccatccaccaaaggagaagagcaagatcgttctttggaaattcgtaaagatgatagtccttatcattcagaaccacaatctaaaatcggaaatatcaatgaggaaaagccaaaattattacctgattctcaaacgacagcagaaactgcttccctagtcaggccaagtctagagagactagactcaacaaaatcaacatcttcaacatcattaactcatcgttataaaagtgcatctcctacacatcaactatccactccgcctattcttccgaaagaaagcgaagaagagagagccgcaaggttgaagagcgaagaagagtacaggcaaaagagactgcaacagaagaaaaggaaagaacaggaattcttaaacagattagctgaagatgaacggaagagagtagaagagaaggagaaattgaagcaacaggaggaacagaggctagaacaggccaagaaagaggaactattaaaagaagaagaacttcgaaacagaaacgaagtagaaaaaagattaaagatcagagagcgttatccaattggattgagagtcattgatttcaaagatcttgagaattacgataaatttgggcctgtgtactacttcactgaagatggatcaaaatgggtgctagatcttcaaataagtgtcattatcaaatccagcaccgaagagttaaagaaacaatcatcagaatttaaagaagtggaaaagggtcagtacccacaactatggaatcttttcaaattcatcttcttatatggcggcagcgataatgcaaacaactcgaagtccttgccctggaggcaattgtcggaaattgaccaaacagagtatgtaaaattctatgaactcccactaacatggattaaactatcgcgattgaacctgcaagatttaaacccaaagatgaatgactggattgaaaaaaatatgatagaatttatcccggcatctacatctgccttgtacagaacaagaaaggtccttttacgtgatagcaaaagacctggccaaaacgaaaataatgctaacacacgctttgtccctgccaaatatcaatcacgctccaaaatgttaccatggttgaatgcctccaaagcgctttggtagggtcattatacatagcataagaagcttaacactgtaacaatacataagaaaagatagaagaagaacgtcttcctcggaaaatagaagtcacgtggattttatatacacgtgactcggacctttgcagatgattttccacgcccttcattcatcacttccccaacccgtactatgcgactgtctttccgggaacatgattggccagagtctgatttagtaacgttaaatccgaaaaaaagttccatctcgtatgaaatgacctaaaacacaccatcatatcataaaccttcgattctccttcgagataaacaatagagtagaaaaaaaaactgttaccagccatttttcttcgaagcgttttcttgttagcgttttttttttcggcccacttccgttggtgctattcaccttttataatggagaaacatgaaaaaaaaagctgtaaatttttcatataatttaaataaaagataaaatataaagctgattttagctagtttcacagatttgaacattgttttggtatagtttctctaatttattccaagggttttcttgtttgatattagtattcacaactagcggccaaagattttataaagagtatgtgcaccgtaagacgtaacataatcaggggattgcgaatgggaattttcaataaggaacaaatgcgaactggagtttccggagataatggataaaatcataagaagaacgatttaagagatgttctaattatcatcccgatgaataaggtggtatagtcatacctgatcaggtttaaagttttaaatggattggttgttttttagtggatttggttcctataagggtttttatccattatctgtatttggtcatggagaaagaaatggcattttgagaattcaacataataatgattgtaactcagctgtaaaagaagggatcatgtttttcaagaccagaattgatatttaaactcttacttattccacttgcaattatcgtctgatttttttcagtacaaagaatcttatttttactaacaacgattaaactggaaaatgatgggaaaaatatgttttttccttattgaatcattttcaatgttattattaccaacagtgttgcgttcctccgtttctagagttgcccgtgtcactcctgtcagatttgctcaaacacaagccctatctaaggcatctatcgtcgatttaccaaacagatgggaagacttgccagctactgaacaacaagatattgtcctaaagctagctgaacgtcaaaagctaccatggactgagttgactaatgttgaaaagcaagctgcttggtacatttcttacggtgcttggggtccaagaagaccagtgcacggtaagggtgatgctgctttcattgccaagggtgttgctgctggtttgattgcctctttgctaatcttcgctggtataagacaactatctggtgatccaccaaagactatgaccaaggaatggcaattaaagtctgatgaatatttgaagtccaagaatgctaacccatggggtggttactctcaagttcaatccaaataattgtgatttcttctacagtatagaatgcattttctccctctcttctattcagtttatttctattctctacaaacaacaagaacaaaaaaaagacacacagtcgatactcaccttcatgatataggagaagttcaaactctttctatttccaactttttgaatgggttgcgggtttttttgcgttttgttgaaattgcaaaacaagagctttcttcggaagcctaaacttgtcctttcgccgtgattttgagaaccaccacacgttagagaatcgaatttatttaatattattttattaacgaagaataacatatccttctatcaccattaaattaattcacaattaagaataaaaatcataccaaacatttgaatttgaaccctatgaaataggacttcttagtatcaacatcaagttttaaaaaaattgaatccaaaaatttacacaaacaatatccaaagccaaaaattaatgatttataaacggacacttatttaaatttgagaatcatttcacgtattctctttacgtttcatttattttatcgaaatcaattaaatacattattctatcattctgaattcgagaattcttttcttatccaggaaagattcattaacattctcacttcgaactatcaatccaacagaaaacccttagctatttaaatttgactagagaaaggctgtttcaaagttataagcatttcaacgcacggtatgtaacaggccgtttattctactagcatctggctcaaagcttgagaaggacgatcgctgacaggatcacaaacaggaaacgaaaagaaaaaattgaaaatgaaaaattcaatacagaaagcgcatctcatctcaacgcatatatttggccaatagaggaaattacttacagaggaagacacatgtcctcataaccccgataataatgtcctttgcatttggcttctctaacgaagatttcagtgatgatgaactagatattgccaatcaaaatacagatgataagccatctacttctgtccctcgaatcaatccattggattccgaagtgttactaggagaatcagtgaatcaacccaaatatattgatctggatgatctactacgttcactcgcgaatgtccgtctatcttttgaagaagtgcaaactccaacaacaaactctgttctttacagacgtgaactatttgacgttaaacatcaattgatgtcagaagtggattcaggcacaaataatgttgaattggagattttgatgggtgaaaccaatgaagatttgaggagaaatgtgtacgaaggtggtttgaaatcatgggaatgttcaatagatctagtagactcatttgttaaaaatccagcacaaatttcccagtgtcaaaatataatagagctaggatgtgggacgtcgcttccatcggaatttctttttatggaatatctaagatccaacatcaataccgggattaatttcacattatgtgactataatgaaagtgtgattagattggtatccattccaaatttgatcgtatcctgggcgaaaactgtgatcagtaatgaacaatggatagagctacaagcttctgaagattcgaacatcccaatcgcctctgatgaattacttctgacagaaaaattacttgaagctttcaagtctgatttagaatttagaaatgtatcgttttcgttcatttcaggttcttggggaaggaaattcatggatgttttaattgaacacaaggctaccccgttatcaaacaccttaatattaaccgcagaaactatatatcagcctgatacgctcccggttatatcagaaaccttaattgagctaatcgtggataacaaaaagaactcatacccggtgaaatgcctgcttgcagcaaaagacatatatttcggcgttgggggcagcatagtggattttgaaaactatatcgccaaaaggatagcaaccgataaccttccattatgtttaaataaatttaaggtaaatgctggattgaaaagatcaattgtactaatagagtgaatcgccacgtatgactctttttaaggcttgatcatcaatcacgtgatcaaaatcactttgtcgacattgtcagattcatataatatcgtgtaattcaatctttaaatatagcttgcattaagcgaatgagcatcagctgtactataaggagataactactgtacttagaaccccagaatggctcagaacgatccacttcaaggctttgaggattttctcgaggctgattttcagccattgcgctttgcaaacgatctattaaaagttacaaataatggcacagatacggatgtcttggacctgaagacgtgtgtgaagagatgctcgtatgatctccaagaattagacagaagaattgaaggtgctatcaagaccaacccaagccatgtgctagaacaaattgagaagagaaagaaggaaaaaagctttgtaggagatactctcaaatcaaacacggaatatttgtctatgtcgtacaacagattacaacaagacatcttagagccatttgaaagggcacttaaactgcagacagtttctagtaaaattcatcaaactacaacattactgagaagttccttaatatatgtgcacatgatatctcagttgcaaatgatgccattagagacagactctactgatgatgagcaactagcatgcgggttaaaaatagctgccttacattcacaattgaagattaatattgaacaaaatcccaacctggcaactttgcagctgataaaatcatgcgagaacaatgtggtttctccaaatcgacaggaattattgcgatatctttccaccaatttgacaagggattgtctaaacaatctcaagatggaaaacaaccctaagagaattgtgactttaatcaaagcattgtatactttatctccagtagatctttttgatacaattgacaaagtactcagttcaaaaattcaaacgacggctcaagtgctatctaagaccatcacatccattagaaacttcaacctgtcattagatgatgccatggaaaatagaaactcgatactcactttacagaacttaatggaagaatgtgagattgaaggaaatacgaacactcttcgcaattacctatctcaaaggaaattttcctcgttgatcgatcaattttggtcaaaagtcactaatagtttcaaaagagatttcgaaatgtcctacaatcgcggtggacctgtcgggaaatctctgcaaagcaattccaatctaatatatgaagccattagtaaatgcttcggtgaaaatgaccctagtaatgaactacaaggcgaactgcagtatatcttgaaagccgttagtatattagatacaaacaggaaataaaaatcaggcttatatttgtatatatagagtaacaagactggtcctttatggtttagccttcgccttacttatagcacctgcatctgcaagggggttcgtagccttctttttgtttttctttcccccacgcttatggaacttcttctttagtagcttctttatctctgaatctctttgcttcctcagatcttctctctctttaccgtgtaatcttgccattctctgccttttacctggcctttttctccgtaaatgcctgatacgaacctgctctgtgtggactttacgattatgctcatctacatctattacttttcctctgaactgaagccatccgggatacggtcccagctcagcatattttaatattacatctgcagacactgcggctgcagaaaagttatgtctgtcctgctctgaatattctgcacagtaatacgttcttgctctacctattggagctgagtctggactcggttcacgaaggctgacctttattagggccgttgcctttctacctctgttttcatctgtctgtacactttcgccaacatcattcgcgggggttgttgaatcggtaatggttccaaaagagaatagtgggaattcaaactcttctgcggaattgttaacatccgattcatcatttctgtccgactttatattgtcttcttgttgagtttgaacgtcgacgaattctagatcaagcttcggcagcactacacgatcatcagtcgctgtaacgttagtcgtggtatcaaagagctcatttctcgaaacaactctcaaaccagacatgattgatttgttgagctttgcaaggtgttcctgagatgatgatgaaaagatacgcagattacatctcatctcctcgtatcgtcatattttgactaactttttgatcttatatatacatgtatattttttttagcatattggcaataggtgtaagatgacagacagtcgaaagtagccacagatagtttgtaatgacaaacatgtattcttatgttatacatatcacttgtgtaaggttgtgtgcaaagtaagattttgctatttcatggtttcaatatctacataaaaaatggtatgtacgcaacttggaagcaccttttaaacttacttcgagattcttgtcttcatgttttgtaagaattctctgtagttccagctgttttggaccttatcttcgaccaactgagatgcagtccataatcttagagaagcaacttccctggcagaaggatggttcattggttcacttggtgaggcgcctctgacaatgtgcaaggttttgtagaagataacatcatcgtgttctcttatctttgtaataacattcctcactcttaggttgaactcagtagcgtctaatagaggtagttcatttttaccaattggaatttccataatgtccggggttccaaacacgtctgtaacaagctctgggacagcatcaccgccaatccataagaacatgtccaatcctgtgtcgattaaatacagaccgtatctttccaataaagacgaggtggagttaattggttgcggtagtacaatttcaccagtttcttcatcgggaagaccagcttcgtcaggcatgtcatgtaaggagtatactgttggataaatgttttgaatcaaatatggcaatggtaacgtttcaagattatttaatgcttgagctctgtgatcagccggaacaataccagaacggaaagccatatgtttagttagagaatgcatcaatagaggccacattcttaggttactacagagcattaatggagctccgccacctgtgtttgaagtcaaaacttctttcttgtatgtagccaaaacctcttggacagatttgttgaaaaattctctagtgtcttcaaagccagaagaaggagctctttccacagccttttgagcgaagtatgctgtgatggccaactgatctgcagaagcatagacttcagttagcttatcagtagttggaataccaatagttatgactctaattcttctttgggcagcattggatgtcaataataaagcaatttgaatgtacacaaagtcctttgttaattgttcatcgataccaatttcaaaaacgtatgattggtcccttggaaccgtagccaaagcgcacaagtctgaagatctattgaagaaatgaccgtaaaatccggtcattttcaagcctgacgaaccacgagctctcataacagcttccaaagatagatccatggatacgtgttttgaaaattcttttgagaactttgtaacatcgatcaagtttaaggcactgaaaccagggtagaaatgggtttggccaccagtgaaacggcctaggttagagatagatgcgatatcgacataatcgtcggaagccataaacatatccaccgtaacttgatatttgttacattcgatagggaaagatttgtagaatgcgtcaccagtgttcaataaagtggaagcttccttggaagtatttgcaacagccttttcatttctcttatgtaatgtaccttcaccgacgttggccaaagtggcaccaacaacaataatcttaccaccctgagctctgatcaagttcaaagcagactttagagcagaggccaaggcaaatcttggttgaatattttgttggaaaatttctggtaagctagtcaataatttttcaatgttgcttctagcctcaattagtggaaccaataggccagtgggagaaggtaagaatggttcatccaagtcagcgacgtcgtacatcttaatgttgtcaccttcttcgtccaaaggaatacggaagtaatgtagagattgatcaacacaaataatagagattcttgttctctcatcatggtttggaatggtatccaagctttccaagagagttcttgcagcagtagccaacaagccattcttgattgatgcctgagaaacgtccaaaatgaaagcgtaagtggatggtggtggtggtctgacagcgtattctttaggagcaacgaaatccacaacagaatggttgaattcgggtctctcgtaacggttaccattcatatcaattgcttgagggaagttgttcgccaagttacagaagttacatctccaacgtaaaccattctcgattacttgtacgaaggggttcaagtaggcacgacaacgtctacaacgaaccacaacaccgtcttcgctagttggcactggacattcagagtcggttaacttagtgtatggtctgataaccatagctaatggtagtttcgattttttcagtaaagaattgttttttggaacggcgttcaaagtgcaccttaaatggtcagaacaattgttaactgtatcgttaggaacaatcatcttctctggagggagcatcaacggtggtggaggcaaagacaagtcagtgattggaggaggcaattcttggaacaaatcaactgggtacaattgattcattggtttacccacagccattcctactcctggttgttgatattgtggttgctgctgctgttgtccgtacgtttgcccatacggctgttgcattggctgctgatactgctgctgaacaccggatatgttatcggcgccgtagccactgttcattggctggccatattgaggagccccaccgtatggtggttgttgcaccggggttccagcttgctggaatgcagtaggatcaaccacaggaacgttgtgtaattgcatattaccaatgccgttacttgcttggtcgatctgttgatgcaaatgttgttgagcaggagtcagaaattgcggctgtccagcacctacagtttgcggaggaacacctccaccaacaattggctgtgcaatcccttctgcaatttggtactgagcctgaggataaacacgcttcttatggtgtgacatggttcagtataatttgatctcctgtatcactcgattgtctgtaactctttctcttttatctgcaaaaaatacaatgcaaagagccttctcctttataaacttctgataagtcgcctagatcctgacacagttattgactctaccaagttgaagatccaaaagagtagatgcctcaatcgatggcaattgaatatcaaatgtgtgtattgtttttataattttcggcccgttttgttattgtcgaagaatcgaaatttgggtttttggatttttgaaattttttttttatttggtttcctttcaagataactgctaaataaactgacgcggtttgagaggctttttccagcgtatgtatatggttgctgctttattagccaattgctcagtcgatgttagctacatatattgtatttctttgatcattgacatatgtgtattgtatgctgcagttcgtatttgtatattgacagctgtcagattttaataataatattcgggtaacatcatagttcgtgttctctcagaatcacatagttaagtaattaatgtcgacgtggtcattgtagaagataaaactttcgggcagattgtgggtcactgatactccctccagacactgtacgggctttaacgaacctacctgtggttatgcagtgctttatttgttgatggatatttagagatataaaccttgctatatcacgtgatatgaaagttcgaggtctgcttattttatttacaatgtgcgtagattttggatcagatctttaaacaagatgtctcgaaggtaaaacgattttaaatacgagcaatccatccattgttcctagtattcgatatcataaggttctacactggtaattcagctaatacctgtgactgacactcaaatctgcttctttttcccactggtacaccatagaatacccttaattaaatcaagtgatgtcccaaatccaattttacaacatcaagaacggagaagaggttcatacacccgcacttattgtccacggaaatataaatacaaatgccaattctgtccaagtgcatcattcgcagctccctcccttaacgtttcccgttaacaaccacggattcaagtgcattatttctttgactcctggtgaaaacttactatggttcactggaaatgacaattctacggcgcaattaactattcaatacgtaccattgttacagaacccgccaattcatctatgtctactactcgctaaagattctcctctgaaatatgatgcaccagctgtacagattcgtaaggagggtggtaacggtctcgatttggccataaagaaattgagaactggtgcacggatcatgcaagctttcactaatgaacaaatggttcgtaacggcgtcggtcaaagaactttccgattcgtggaagaattcacgaaggataccctcctaaaggatgacgagttaagaaacaccgttaagattcatattctaaaaagtgagaagactaccgtggagctaagagatattaatatcgcacaacagaatcctaatgcaaaagatgcaggtggcttatttggtatagctatgaaggaattagaaagatatggtgcaccatttaatgacaactataacacttctcaagctgctgtcatgttcatggatagtcattgggacaaaaaactgaaattgattactgcgcatgccgctctcggtggtggtacaaataagatcaaacttgcaattttcggttcccatggtctgtattcttggcctacttgctttcaagacattgttccttactttttagatgataccagagcaagcacctctgaagtagccaatgattgtaaccagtgcggtacccactgggaatgtctcgcaattacactaggtgcattcatgcatgaaataggacacttgctaggctgtccacatcaagaaaatggggtaatgttaagagattacatgactttgaacagatcgttccttaccaaagaagcttacagtttaagaactaattcatatggtgcccaatctccaatatatcctaaactcgaatgtacatggcacagattggatattcttcgattcttataccatcccagctttgcactacctcaagacttttatgatccgcaattattaagaccaggtcagctagatcattggaaatatcagaaggccaccttgttcccgatgggaaatcaaactgcaagtattaaatcggaatcaggtatctactgtattgaaataatatgtggtgagttcgggaaagcccacttggaatatctaccaaaacaacatggtggtgtaggaccccaaaaggaaatcttagttactctggatcagctgcgttccatgattcctcctgctcaagttcctgagttcggtaacaagttcaatataaaagttcactccattaacgctgctaccgctgaatttaccaactttccggagataatcaatgttaagccaatttccatgaaagaatatggtttcggaaataacgttctaggtgttaaatctacactattaggtaacgccaaccgtggtagtccaactggtttagttccaattaaagttgagcaatgctacatcgtgcgcgtttatcatggcgcagctttagatggtatcagattttatgctaaggacacatcagaagctcctcagattcctccacgcacttacgccggaaaggtgtctagcatatttaaaggtgcaaaagatgttatgacaagtggtccatcagtattatttgggaaggagactgctaattatagtgatctaagactggaatccaacgaatatataacaggattcaacgttagagcaggtgcttggatagacgcgatccaggtaattacaagcaaaggtagattatctgaaatgttcggatcaaaatctggaggttcattgggaacactaaccccgcctccgaataagaaagtcttggcaatatacggaaatgtcagcagttgggttgacgcagtaggaatagttttcgaggcttgatggtcaaatacgataaatcattaaattacaactaaggttgacgttgtagtctgtaaatacttgatgcagaagatatttaaaggagtgttaaactattaataagatctcaacttgtatgaggggacattgtttcactctgacttctagaaagagggggagcctgaggtgtagtgtcactctttgatttttcattagtagccaattttgatagcttttcatttaacttatctaattcaatcgagttagctagttccctaggagaaacacttcttttcaaaattccaacatggtctgagctatggttacgagacattgtcctggccaataagctgggatttgtccgatatggtggaagttgtctagctgggtgaacagatctagaggcacctgacatatttgtggaggaagagtacggtagattatgtggcaaccgattcgaagactgtcctccactgctggttgttgtgaagctactgctatggctaacactcctggactttccgctggtggcagaggatggagcagtaggtatgattgagtatcttctttcttgatggactaaaccgacctctttaaccttagttgtattcaagtcagtatgtggtaccttagaaaatgtgtctgtttcttcgttatattcatatagataccagcttacaccatatggtttgggctccaaacagtacacggaatgtagggggacatccaaatttgtaataacgtccttactcaagttcaaaaaataaccaagtaaaactcttgctaccactcgatgcgtgacgattagaagattatccgtaattctttctatttctgtaatcacagggcgtaacctgttaataacatccatataagattcacctccaatgccaggatatctataccttaacttgtctagaagcctttcttcatattcttcaggagagcgtagcaatatttcttcgtatgtaagcccatcaaaatcacctgcacttaactcatctaacattttcatttgtttaatgtcaaaatgcctgtcattaaaagtgcatgcggtagccatagctctttttttcattgatgtccatacaaaaaattctgtcggcgtaaactcatgtttggtatcttgagtgcaaactttcaagtgttctttcatttgattctcattgaaaagctttctttgttcctccataaacctggctaaagctcttgcatatttcaaaccacgtttagttagttgagaatcaccaccgattttaccagagacgttaaattcactttcaccactccttgtaatccagatttgtctctcagcaagattgaagtttaatagatagtatactgtttgtgaagccaagaatccctgtatatcataggaaacaatttttttaccaatgtcgatcatcttgatgtatggaacattttcatcgtcttcgatggtctcatactttttcatataattagacaatcttcccttgaaatctgataaagatgactcaggatctttccccttataatctggtcccagtagtttcattcttatattcttttcgacggtctctttatccgaacaaatactttctaggaacaaaactttgatgaatttatttctttcatgaatctttttaagaatcatcctacgcctttctttagtggaattagttgcatcaaagattccaactgagcctgggccattcaataaatattctaaaagttggtccaaagtgtcaagagcccatttattccttaacatcttggaatgctcgtcgtccggatcaaaaaaatttgaatcctgttccttcatgttatgttcttttgcaaattgccttctagtattacccacattgaacactttacaataatacatggaatagttcaagtacctggataatttatttgtaatgaacgattttcctgtcgcaggcaacccgaccattatgatgatcaacttggaccccggatccttttgagatataataccatcgggagaagtcttagattttgtcaaccccggcacatcgatagtggtgggcctccttttcggtaccatatgagacggtgggtgattttcaagcatcgactggtcctgccaatcttctgcgccgctttggaacccattctcggaagaaagttgttcttcagtgaccggtcccaacacaggagacccagttggtgaagtgctccttgaactttgaggagacgtctcagcagaagtctctactgaactactgggagactggaacctagaaacaacgggcgtatcacttaaaggccgcttttgaaactgaggtaaattatcaacctcgtagattccatcctcattctcatccattttcaattgtgtcgcttgatcatgtctcttatcttcgatggactgtgtaggttccaactcggaatctgaactagaaaccaaaacatgttcagagaacgaaactcttctaaacatatacgaattggtaaatctgatgacaggatcccctaacaaaatctctagttctcagagcgaaaaatataaacgctagaaaattgagaaaaattaacggagaataacgttaaacctgaacgttgaattcagtttactttgccactgagctgtagtactttaaatgctaaaagcttgatcctgcccttgtttagggttccatgtttctgttacatcattcctcatgtgatgttagaataaatcatttcaaattctaatttcaacctatatataattttaagggaagaaaatcaaaaaaaaaaaaaaaatgctatagttaggaatgagcatatgctagcttccttgggtcaaatggatttttgggcctcgaaaaacgagaggaaaaagtagacttgctgacataagggacaaactaaaagaggacagacaccaaaagggaagagagacaaaaaaaataaagaaatcacgtgatatatatttctctcactcctcccattctctcccatactgtctcgctcatcttactttacctatttcatggaaaacgtaaacaaaatcagaattcgtttttgatatttagcattacgacaatgataaagcgggagctttagtgttgagatcaattgaaggcatagctattggcacagcaggtcctttgaagagagttttattaggtaaagttttgatttacaaatctagaaactgttttagcaggatatcccagttgttcatcagagtttacggtggcagtgtgttcaaaatattactcaaaaaatgtcatttctacagaacttgtatgttgtaagattgttatttgtgtcctctttacaaagtaagtgagagcggccttgatagttttcaattattttactaacgttgaggtttctgcgatttttactcgcttgggaactttccatatgttttcagtcatttgagtccaggtcagacgataaaatcaactcgaggattcaaatggaatacagccaaaaatacgaataaagatgggaatggcaatggtaatacaaatggtaacggattccaaaatgtaaaccttacaaacgacttgagtttgcctcaatttaacgataacatgccacaacagctttcaactcctcagaaacaggcaactactgcacatcttttccaatctggactggatcatggtgctggccctgttacagatttcaattacacaccgtcgcatcaaagaccttacatacagtcaacttcgggcaccgtggtgtcatcccatcaggacttaagacagatcgtggagaccactttggggtccaaaggtgttttaaaccaggctgttaaattacctaagggcgaaaatatcgacgaatggattgctgtacactgtgtcgatttctacaaccaaatcaatatgttatatgggtccatcacggaattttgttccccacaaacatgtccaagaatgatagccactaacgaatacgaatacctatggaacgtccatcctgggaaacctcctatatcgttaccggcacctaaatacgtcgattatcttatcagatggtgtcaacagcagtttgatgatgaatcatatttcccaagcaaaccaggtgccccattcccaaaagatttcaaagactctatcgcaagacctatcttgaaaaggctatttagagtttacgcccatatctactgtcatcatttcaacgaaattttagaactcaatctacaaacagttctcaatacaagtttcagacatgtctgtctgttctcagaagaattccacatcttaaagactaacgactatgggcctttgcttgaacttgtaattgaatttaaagataggtgagaacgaattcccatttaaaccgttcaaaatcaaatgaaaatagcacttgaaatgatggttcatcaaatccacattcgtaggtaacatatacatattttgtataagcatcacccgccttcctttttatagtctctcttattttaagatctgtcgtgtctatgcggataactccggttcagtttcaacgataaggaaactcagattgtgaacaatcttattttacacataaaagatgaggtacaatatatgaaaatcttgccttaatgtcctgatataaatatattagcgaacgttagttacgagttaaacaagtcagccgcgtgtcctgggctacttttcaattgatatacaaacaatgaagctggctgattttgtcacgtacgtgttcggcagcttactcgcaggattggttacattgaaagtattgtcatccttcataccaagtttgctagtaactctaccagcgaaagtaaggttacgtgttaataactcacttctaaaatgctcaaacaatttgaacaggattcctgtgctggattttggttggaagaactcctctgttagaagagcctttattttagcttctgaaaggccatcggattatacaaacaaaatatatggcgatagggttcatatagcatacaatgatagaataaagagagagtcattcgttaataagttgggttttgattcaaagcgtaaactcttagggtttttccatccttactgtaacgctggtggtggtggagagaaagtcttgtggaaagccgttgagacatcgctaaatcaggataaaaacaatatatgcgttatctataccggagacacagatgttaatggatcagatatattgaacagtgtgcggagaaggtttgaatacgatctagattcggacagaatagtattcattttcctacagaagagaagactggtagaatcaaaaagttggccgaaatttacgctattaggccaagcttatggttccatcattttgtccattgaagcgcttactacacttgctccagattattggatagatacaatgggatatccttttgcttatccctttgtatctttgtttgctaggattccaattgtaacgtatacccattatcctgtcatctcaacagatatgctacaaaagctaaaaactatgccaggatttcacacaaactttaaactgatcggtaaatatgtctactggaaaatattcatgctcgcatacaaattttcaggcttatttgttgaaattgcatcgactaattcaacttggacttataatcatattaaatccatctggtcctcaacaaaaaatattcacattatttatccaccatgttccacagaatcattgatagaaggctgtgacaaatcagatccagttaaaagactaaatcaagcggttgttattgcgcagtttagaccagaaaaaagacacgaattgatattatcttccttctcttctttcatcgatgctacgactaagaaagatttgattcctaaaataatatttataggatcaacaagaaacgtagaggatagggaatatgttgaaacgctgaagaagtatgcctttgaggcacttaaaattccaacccatttagtggatttcaaaactgattgtaaatatgatgatatgaagagtatattatattcttcatggtttggtataaacgcaatgtggaatgagcattttggtatagctgtcgtggaatatatggcaagtggtttgatcccattatgtcatgcttctgctggacctctttatgatattgtagtgccatgggattcaaagaagaatgaacaaagtactgacaaagctaatgaaaccggctttttcttcatcgatgaaactgatccggattttctagccaaagattcttcaaagtatagttctttacgcacgttatttgctcaggtatcgaaattgaatactgtacaaagaattgatatctcaaatagagccaagatgtgctctttatcaaaattttctgattcagagtttgaacgttcatggaacgaggtgttggaggaactcaatttgactcataatagaatgttcagttgaatttgaattatataaattgttacattacttagacaatgaagtaaagctatagatgtttcgatatcagttcgtatatgcacttgctttgaaaacatgacatcatacttgttacaattttgtttcggaagtattagcagagagaggtgacatggtgccattttggcgagattactacacgttattcttggcagaattttctaatgaatattggcctgatttacgaggatttttaggggttaaaaactgcgatgctttgttcattggctcgatattagagttgttcaaagtggtgttacctgtagtttcagaaaaagcgtgtatctcgttttctgtccttggggttgccagaatcgagtcattgttgtcaacactagctctggctgcttggttgccttgtggtgtagagtgtgtcaataccgatttattatgtgagccatccaagttcaatttttctgtgacaaatctagctttttccacaggattggaggtagaagttagctgtttaatattgttgaaccagtccatcatagattcgtaagaatctgttctgaaaacccaattatgacctctgtggataatcccgttttgttttgtatgcaatataaacttaaagtctgaagatcctttcttggaatgttctgcaacagtacagtcattcaaagacaacgatattacgggaatcaagtctttcttcctatcaccggatttaaactcatgcaagaaacttggagttaagacatagaacccacgagaatatgatttcaagaatttggatcttctttcgagaattccagatttaatctcgtacgtgaatggatcattttggttcttgtaaacaatgtctttgacacgtctcattggtaagttaggatcgatgaaatttgggtccttagcgacaaagttttcccattcaaagacaggatctttattgaaaaaaccagtgtccaatttggaaatcaaaacgtcaaacactatctgagcttcttggcctaaaactttagcgtaactggtcaaagcgttttgaatttccatcataacaactttttccaactccctaccagaagtttgtaaattattaaaagcttcatgcaagaaattctcttcggtcaactgtttcttgatttgtttttccaaaaggatcttcgctaggaaaggatcctgtttcacagatccgtatttagaattttccaacgattcctggaaagcttttaaacgaattttggtttcctgaagttccttgttacatgaatttttgaaatctgactctaaagattgaatttctttaattttcaccaatagatcacgtctcatatcctctaatctggggatcacatcttgactcaattccttggaggcctttgatgctgcatggaccatttgcgtatggtactgattaaataaggtgggtagatcctgaatagatccgtgccctagaggcaaaaagaatttttgaatgttcttgtcctctggagtggtaggttgatgttggctatcaatggtgaaaaatgggaagttaattgcatgctgcaatctcaaatgttgtcttacaacttcatcttggatggaaaccgtttcttgtagatatacaagaagtgatctgataatacctctccatgctgcaaatctctgagagagaacttctgtagggttcgcattagtaggcatcaataccaccaaaggagatctgggatcctgaccgttggacctatgtctttgcaatgaagccctgtttctgctaacatgcgtatgcgagctagtcaacgaattcgtctgctgctgtctcttggaagaattcatttgagggaaagaaattccttcttcaagaccagttgcatttgcattcccttgaacgccaacaacatccgctgacatggatcctcgcggttggttcacatcgatagatatgttatcggtcggataaggaattgtctggccagcaaccgaaactctgttgttagcgctagttccattcaatccgctttgctggaaattcttgtaatcagcagaagtcaaacttctagatggttgctgttgcagctgctgcaattgctgcaaactgtgttggttttgcgaaagcatatcggctatactgctagtcatagtgttttgtttggacatcttatcactcgaaagcacaaatcagaagtaaactataatgatgatgattatgatgataaagtctgcgatagcccggcttttctcttttttttgtagctaaagggctcctccttctttattccttaataactactcaaaccgtaattatctccaaagtaccgaaaatacctcgccaggagaaaacgctttctttaacgttctatcgtatcagtttcttaacaaagggaaaatggaagcacaaatccctagtattgtactgaacttgaggtccttgcaaaatttcttaaataattcttcccagtttcaattttaattgcaatttcaaatttttgttatttttaaagctgggctcccaaaacttcctctaaatattactgtacttggtgattactacagcattttcttatgattttttttttttccattttttgcattcgatgcttctgtgagataaagaaaggttcaatacatatggatggggttggagaaaggatgctgtggatcctggtggtgtaaagcttgcagataaggggtgtgaaaagctaggacgaagacgtcaatggcactgtccaggatagatctgtgggaagaatgatatttagtagtatatattaccatgtattgacgtttggccctgtacagagtgatgaggatattctgcttcaactgaatctccttgtatccataggcattttttttgttacgtgtggcatacgtcgaaatcaactggccgaaatggacggtatagtagaagtcctattcggctaaaccgtctcttcaactggatacctgtgttctgctctttgtcatgttttcagccacctctttgaagtgttgtgtgtaacacctgtgtgcatactgtatttgttgctactggggttcctgcaagatctctgagcgatttctccgatcacacagttacctcttccgattaatgacacgtgacaccgaaatatcgttttccctttctcagattttgtttacgtttcgttcaatatgactattgaaatctcgaattgagtaaagtaatgaatcaagtgattgacatatcagcggatcagcaggcaagggactgatatccaaagtctttactgtacccccggcgaatcatttaaattcaagagcagaacgttactgttccaacattattcaagaaaaatagctctggaaagctactgtgggagtatctctcaatgcagtatttcaccaaagatgcgtccatggtgtatacgtatgatgggatacaaaagacgaacgcgggcaatattaagctgcgacgtttgaaaacatcatcgatatctagattgttttcaaggagcaaaactgcacgtctgcgtaacagaggcacaaggaacaaacaagcaaaatttgtagggtctgatttgaataaattagagaggttcatatattcagagagattcatgccatgtgtcatattcgttatctgtatagtgacgctactgcatctgatacttgcccggctgattaatatgtttcaggaaatggtcaaatattatttctacgcgaaccttttcggaatgggctgggattggtactcgaaatggaactggatagttttacatatacttgagaagttcgtatagcttcatataatagatcgcattaatcgatgttctctcagtagttacagtgtctcatgttaagcaccatgaatcatactgtagtatcatatttaataaaaggcattatagtgcgaaaatgcttacaaatgaacgtcattgtttccatcctaaagccgcttaatacagcttaatgaaagaacatacaactgacacagactcgtggtgacaattttcctcactttgatctgagaacatttcatgtttatatttattccatcttatttgtcccatgcggttactctatgtgtcaaaaacacttattacccggtacacaatatgaattgacaaagggtacatgaaaaaatgtgtcaatctgagcttttgcttcttgaaatatgaacgaatgttaaaaaatctccggtattgcacaatacatactatcttctcattcatcttggcgttctttcttatattgtacttccattttgagtttctcttttgaaaacaagtgcatgcacgtactggctaattcagttggctctaatttgtcccctgttacccctatattgtggaaactttaacaagagctttgtctgtctttttgttttaatattgtgtgtgtgtgtttttttttttttttcattaatatctaactactggagagatcgttttgaggttgaccaatatttagtcaattgtgtgtcttttacctaatttttcaagcggttccatcttcggcgcatcgttaaactcatccctgccaagtgtatgcttttcaatttttacaataaaacttcggctgcttgtaaatctttacccgctaaagctttatcgaacgttagatatttccaaacctctcctatatcgagaaaaatgccacttccacctgttcttgaatcacgtcgtcccaaagaatctccggaattcgactattctacactttccaattacaagtctttcaaggtaaagcattcacagttggatgttagcgttgatttcaaaaagaaaaccattagtggttctgtctcttacgagattgaaaaggtgaagaaggatgaaaacactatcaagttggatacttcttacttgaagatctctaaagtcaaagtggatgatgaagacgacgtgaagtttaaattgttagaaagaaaacatccattgggtgctcagttaattgttagtccatcttctttgccggaaatattccatttgtgcttacaattttcgacaactgcagactgtacagcattgcaatggcttgatgaacaccaaacatctgggaaaccgtacgttttctctcaattggaagccatccatgcgagaagtctattcacatgttttgataccccaagtgtaaaatctacatatctcgccaacatcaagtctgaattaccagttgtgttttcgggtatccaaacaggttacgatgattctactaaggtctactctttcaagcaagaagtaccaattccagcatatttgatcggtatcgcatcaggtgatttggccagcgctgatattggtcctcgttccaaagtttacgtggaaccttatcgtttaaaggacgcccagtgggaatttgatggtgatgttgaaaaattcattaccactgctgaagacatcattttcaaatacgaatggggcacctacgacattttggtgaacccaaactcatacccttatggtggaatggaatctccaaacatgacatttgccacaccgactctaattgcccatgataagtcgaacatcgacgttatcgcacatgaattggcacattcatggtctggtaacttggtcacaaactgttcctgggaccatttctggctaaatgaaggttggacagtgtatttagaaagaagaatcactggtgctattcatggtgaagctaccagacatttcagctcgttgattggttggaatgatttggaaggttctatttctgctatgcagaaccctgaaaggttcagttgcttggtccaaaatttgaaggatggtaccgatcctgataatgcattttcgacagtcccttacgaaaagggctctaacctactattctacctagagaatctgttaggaggtaaagaggtatttgatccatttatcaagcactactttaccaaatttgcacgtcaatctctagatacatggcaatttttggatgctttgttcgagttcttccatgataaacgcgagatattggaatctgtggactggcaaacgtggctctttacccctggtatgccacctaaaccaaagctaatcactgacttggcggatgatgtgtatgcattagcaaataaatggattgcaagtgcacagaaattcacagaaagagagcaattcgaaaaggaattctccatcaaagatatctcggagttttcttccaaccaaatcgtcttgttgctagacacactagttcaaggtgggatgccagaaaaggatactttcaaatggtccaactaccctgaagcttctgaaatcttcaccgatatctacgaagataagatctccaagtcccaaaacgcagaagttatctttagaaactacagattacaagtgaaatctcacatcacatcatcatacccggaactagcggagtggctaggtactgttggtagaatgaagttcgtccgtccaggataccgtttattgaacgaagtggatcgtgagttggctatcaaaacgttccacagattcagagactcatatcatcccatctgcaaatctctcgtaaagcaagatttgggcatctaaatttccctgaattctatccataggtgtgtcatcagtattatttaaaaaaactaaagttacactttcatacctctctcatcaatatatcgccattcaaggctgtagttcttttatattccttttcacgtgacttctcctttttgtaccaagaatttctgcttatgtgttgtcatctttgaaaaaaaagtttgaatctggattttcgcattaaatcacatatggagatcattgaaaagaagtctaacatgttaaattgaaaagagttttggactgtaacagcagcagatcgagtgtgaaaatacccaagcttggcgaccatgaacaactttgctcagttatccgtatgtttgtttttttcttttatgttttggcgtaagttttgatcacacgttaaacatttttgtttaagggtttaagacaatgaaataatataattcattgtatgttattttaagttggcatattcagcatactaacagttttcatcttgaaatggaatcttctctctttagcaaatctccagttttgcgcagaacttgtctgtggaacgcattaagagcgaatttggttctctacaaaatagattggcgtcggtacgtccaccacaggaattcttcgacttcaagagaatttccaaacctcaaaattttggtgaagttcaatcgagagtgggctacaacttgggctatttttcaaccaactatgtcctgattattagtgctctaagtatttacacgttgttaaccaactttttgttgttgacggtgattgttttcgtggtctttgggactatgggtattaacaagctaaacggtgcggatttggtcactccatttggttcttttaagacttctcagctttacactggtctactatgtgttgctgtacctttggggttcctagcttctcccatctctactttactatggttgatcggtgcttctatcgtcacagtgttttcccatgcttctttcatggaaaaaccgattgaaacagtgttcgaagaagaaaccgtttaagcagaaagttcatttcgttggcaaacttatgtcactctgcgactcagatgatatcgctccagactaccgtgctctgtaaattttattcacaacagtgatctcatctgccattttataaaatagtataaactcaaatattttctatgtactagtatcttattcatctacaaccttccaggaaaaagaactctttctttgagatcactacaaatggatgttactgttcagttctctgtcaacatcaagcttcacattacctcatctctctattttttgagcccatgctttgggtacttgaccggtaaattccttacttttacaatacgaaaataattcataggtacgtaaatacaaatgtgaatcggttaatacaacaagatatattgtcgacattaggaaagtcacagaaaaatcttcaaggatagcgtacactttcgaatacttacaatgcagaatgacaataaagaagaagtgccggctctggctgttttactaggctcaaacgttaaaaattggccatattctgaggatacattggttcatgccctacaattaaggtctcaacaagaacaaacaaaaagacaatattataaactagagaatgtcaacaagactttagagatgttgaaaactgctgtgagtgctggcattccagtaaatctgatccctcaattattcaatagtgaccattctggtatggaaaccgaccctgcagatttacgtcatatgaatcattctaaggagcaatctcccttattagcggtccctgacaagcagatgaaatcgtataagttccctcctgaaaaccagtctttgaggccgcctacaacaggtgctgaattgaaaactcatcgaagaacacattctcccgctagaataggtgctgaagctgtggcagctcttaacagtagtatggctcttaaagaaaaagaattgcatggtaatgatgatgaaaggcggaaaacgattggttctgaaaggcatatacataagagaatgatgtcaatgcccatcttcaaaaatgaaccaacgactggagtgttaaacttttcggcttggcaaacatataacggtcaaaatctatcagggaatcacccagggtctggaagaaaactcacgacgacgggcccttcatcgtttccacatgcagtaaggaaacatagaagaacacattctacaaactctgcttttggtgtcattgatttgaactccatcaatcaggttgcttttaaacagtcgaattcaagaggtagctctgctattggaaataatgttaatgatcatggggatagtcccacgtcgggaaaaaataattcaaaggtagaaaaagaatctgacccatcctccgttggaacaaatgacgatgctttcggtgatgatagtagcaatgacaccactatcgatgatatcaaaaagatctcaccttctcctcctcgaacattattgaaaggtcctaactatgtggacaatttattaaatacctgattgatactaccggattaaagatggttggaaaattgatctatataagtgcactcattgtactatttcttcttgttctgctaaatattctatttcggagatattcaatgtttcccattcaacctcgccagtctcctcattcattcctgaaatacattcaaattcaatgtctgattttgtgatcgattcaagctctttctttgcttgaagtgctagtgattgaatcacattatcgtttccctgagaaatgaaccatgcgcaaagatcatccaacagaattttattgtaaacgtagtagacatcatggtatcggaatagttcatggatatccaataacgcttttattaccaaacgtttccctccaagtaacagcttgatagccaactgccatgctttgatacagaggtcatagttacgatgcaacggatagctgagagctcttctaatacctgttactatggtacctttgatttgagagaaatgtattaaagactcggatagaagaatctgttggtccaacattgagatctgtggggtcaatttaccgattgtccattggctttcagttgtatgttgtccctcattttcgatctgctcaaaagtgtaagaatataatattgataatatcgttagatattggcttttaacgtcatttattaagtacttctttttaggaatgtggtcttgcatctgagtctgttccgcttcggtgaactccacaggaaaagatacatttctttccttcgattcattgtctgacctttcgaaccactgctgatacctttcgcaaagaggaggaaggtacccaagcaatctttttatgccattaatctggatttcctcttcatcgccctgttttatggttatatattcagcagcatagtactctggatcaaatttcaaattttccttcttcaatctttccttgactctgttctcgggagaagtatgttcaggatcatccaattcgttaatgtcattgccatttgcaacggacataacaatatatcctgtataaagattatcgaaaccgtatttcgttgttggtgtattatctacttgaacctcttgtttgatttcccaatcaaaatgctctccttcttctcgaatatcagcaattgattctttctcattactaatttcttgaatcaacggcccatctgtcactttaggttcattctttgctgccaataatttgctagcgagatctaagtccttgaactctttacctttaactgccttcagaatcttacaattgatgctctcttgtttggaatcatattccactgtatttaaagtttcatcctccaccaattcatctgataatctcaacctcaaataatacggcgacaaatggaagataaacatacaaccatctattacaacctctacaccagcactgttaaaccttatgcttgacaccttaatttgtacataaatgtattcatcatcctgagtgacagtaaatcttggagttatcattaggaacactataccggtaaaatacgaaactccggtaccaagttacttcttgtatagtttctgaaattaatgggtggtcaaattagcaattcagatagttatgtttatagcaactaaaaaggacatataatcccatctcagtggcacataccttgaccttttagaattacagtcatcagaaattacttagacgattacagaaaagaaagaaaaatttccaactttggatatttgaaaagaattaccaacagatgagatgagatgagtcggtttaggttttactgttccagacaccatttaactgcaagtgttgtgctccaattgctaaatagcgccttttgtgatgactatgggtgaagttgagaaaaagcctagaagaaggtttgttggtatcaaaaaagctgcagaagaaagtgatccctcgggatcaaccactgagctagtgaagaaaatcaagcctaagactaacattcgtcatgctattaatcagataccgccggagcttttaaatgacgaagagttaaatgctgctatcaagcttcttccctcgaactataactttgaaatacataaaactgtatggaacattagaaagcacaaagcaaagcgtgttgctattcaaatgcctgaagggttgctcatatactctttggtgataagtgatattttggagcagttctgtcagtgtgagattgtggttatgggcgatgtttcttatggtgcatgctgtattgatgactatacagcaagatcgttggattgtgatttcattgtccattatgcacattcctgcttagttccgatcgatattactactatcaaggtactttacatctttgtcactatcaatattgatgagacacatctaataaagacgttacagaagaacttcccaagaggttcacggattgctgcattcggaacaattcagtttaatccaactatccatagtatgaaggacaaattgttgcagtcggaggaacacatgttatatatcatcccccctcagatcaaaccactttcgaagggtgaagttcttgggtgtacttctgaaagactaaacaaggaacaaatagatgcgatggtttatgttggggatggtaggtttcatttagaatcggccatgattcataaccctgaaattcctgctttcagatatgatccctataatagaagattcaccagagaacgttacgatcagaagcaattggtagaggtaagagcatctgccattgataaagctcgcagttcgaagaaagttggtttgatacttggcgcgttaggtagacaaggtaatctagcaacagttgaaaatctcgaaactaagctcaaggcttccggaaggactgtagtaaagattattctcagcgagattttcccacaaaagcttgcaatgtttgatgatatcgatgcctttgttcaagttgcctgcccaaggttgtccattgattgggggtatgctttcaataaaccattactaacaccgtacgaaactaacgtgatgcttgaaaacgaccggatgttcaatgagaaatattacccgatggattattatcatattaacggatatggtagaggtaaggtcccaaaccatgacgacgtaactatctaagtaaatgcattaattatatcgaattacaatctgggacatcacatttgtttatttaattatttatcttcaacacctagtagggtggaaacttcgttagtcgtaaagtttaatgtcgacattatcatttcttcgtcttccggatatattttgttcaaaacgcttttgaacactttatagaatttgataaaatttccgaaacaggtggacacaatgtcctcttcaaccgctggtggcatcaaattgaataattttacatcttgaaaatcagaaactgctaatggaagataggtgttcaatttttcgtggatattgtcgtgaataactgctaatttcatgattgggttctcaaccgccgaaagatacatgtcgtaatcaagctcatcttgcacagaaataattgggaaaatcatgttgaagagattaaagtacaattccatacccgttgattcgaacagatagctattcattgtttcctttaacttggtaacgcataatgtatactgcgtttccagtttcgaaaagacgcttttgccgtaatcagatgaaaaaatggtgctgtgaaagggacctagttttgatttcacgagatcaaaactattaatctgtacgataagtaaatcaattctggctgacttttcctttttagctgtggggaaccaattctgcaaattcaatactaagttattattaatggggtctaaaatcagcttatcatacaaatcatctgttaatattcttgtttcgttttgctgctccaatttgttcaaaagttgagaaagtttggacaaataatctacaaaccagtctggtggaagtagatcggcagccgcaatttgatttttatccaagtccttgagatatgatgtaacacttgaaacaattttggatcttgcgagattttccagatcattgagactagtcattaattgactggattcattgataccattttttacgagcatcatttggtataaactcaaacactgaacgatgtctagatttagcatcgggttattttcaaatcggacaatttgttctaaccttattctgattgtattcgccaatgaggtaaatatttcgttgagaagcttcaggtgcaagtcaccaatgaaatccatattatctttcaaaactgagtcggacgttactaattctgactttagcttgaaagttgatttcaaaaattctagttcgttaacaatcatggagtgcacgtaagctaggacatcaccaagatatctgacagggtcatgggccgatagtataataggtctttgtaactttttattatctatatcaaattgagacaaaaagtcgtctaataaccttttagaccttaaccccacaattctgttcaagaaatcttgaaagaattgaacgtcatttgataaatgaatcaagctcgtttggaagttagagagagattcatcgccaatagtacgttcgccgtactgccttgataaagtatcatattcttcaatgaagtttatgagataattatatatccgtttgttcgataccgttaaattattattcatcgtttttaatagtgccacgccagcagatgtggtcttctcattggagagtagatatgttgctttttctttgataaagttgattttattcagaatctgaaagaagaggtcattaattgttccattctgtaaatgatccagttctaattgcgttaaagtcaaggaatcccttaatttaattattacctgacgtcttgccttcaattgatcaagtctatctttgacatgttcgaattcaaaatctatggattccgttgtatctttaaaattctgcatagcattgttaattctttccaagggtccagaaagtcttttgattcttcttgcaatagactgaaagttactcaaaatatccgaatgggagttgagcattgaattctcaagctttgagcgaagtgattttctgtttaaagttccaacgaaatcagaggcaaccagttggttgaagttaagtcccaaatcagagtgatttgcatcaaggatttgaagagctcgttttgtttctgaatcagatgtgtaactcgcataattgggaacattcaataagctgttaatcttcttggataaaagttggtttgtagttgtaggtttctcgatgttatttgatataggagctgcgacctccttcgataaagagacggacgcagggcgtatttcaccgagggaaatgctggcaaaatgtttcatcttgctgtgaagatcggtaaactcggtgtcatgcttgctgacattcggtagaacgaatttggcctcttgttcatcgtcattcaatctcaagcttgccaacgaaagacgtgacgctggttgaggtaatgcagcagactcgtccactaccagtgccggaaaatctagaaagtccattacagatatgagatctgctatttataattgagtgcaatgattagttagtatgtcagaatcctgatttcgcgagtagtttaatgtctctttaatacaatttgtatgactttctatttcgaaaaatgaaagatttaggtttttcgtatttattgaatcggtttatatatggtatgtgtgtaattgagtattgtacaattcaaaacataaacaaagtaaagattattattgtttgaatctaccaccagtggagactacgtacctaattaaaataagggacaataagcatctatagtatgaatgaaaaaaagtgaggtattcttcaatatcagaacctggttctaacaaagaatagaataaagtaatttaagttgaaaaggccactgtcacgataaggtcagccttgttgaaaacaatgcgtgcgccgtttttcgttcatgatattcttgatttgaatattatctttttgggtcatctaagtatgagtttcttatatcatcaaacaaatactgtattggcggtaaagtgacatcagaagattttcttctttcttcagcagctggattctgctgaactattccggtccatgattgcgaacgatagtgacgattttgcagatggatttgaggaacaatcgacgggtgtctatattcattccaggaagatctgcgagaaatatttagaagatcttgagcagtattcaagctatctctttcatcgctagtgagagttgagatggaatttgttgactttggagagattgaagcagtgagggacggcgaaatttctgttctttgtgaataccagtattcacatttctcaggaaaatcgggaccaaacaatgggactagtagatatctcaaggggtagcaaaatctcgaacacaactctttagaaacaggatatggcaaccaagtcccttgaatcttgatatatcctcctctaattctcttcaccatacgttcaaagggaatttttgcatcataggattgacccaatagcgttgataatgtagggttcaacttatgccaatgcaaatcgatataagttgagaaggattctctttgaaaccatttgttccatttttgttgggagtcttttttacttggtttgtccagtttaccgtatatgacttggaacaagactttctgcaattctttacaacaatggatgcgggcagattggtcttgttgatattgtctattcgtggtgcataagcatttcatgatatcttggtacaatctccaaataccagtgaaaaacacataccccgtttcacaattccaaattatgcaattgtttggatttatgatcagtgtttggttaatcttggcgttcaatttaatcattctaaattcttgattttttgtaatgttagaacctggtttattggacaggtttatagcagtcctcaactcacggtcagaagaagataaatcatcaggaaaacatggttggtttggatcagtgtcttcttgttcgtcttctaatgaaagaatgttgtatggagttaattgcaaatacggctgaaaatgagggtcaaaagtccgttgtgtcaccgggtttcttgatatatccggaatgatatattcgttacaaattaaactggtagattttttcaactttcccaggctgcccgacttattacgatgattctgtcgcctttcgttggtatattttccattattctcttggcccaaggtatgagatccttcctcatttatatcaccactggattgcgattcgaatgattcaaaaactgtatttgtcttgtattccttccggtcgatagataactgtgacttcaaagcatggggaaattgcgccaaactgggtcgcattagttcatacacttctacaaatagatatctttggtaatcatccaacggatctggagacaactgaaatgtagttccatcggttgggtataccccatattgatcattcccaacaacagatggcatggtgcaattgtctatcgaaagttgattatatcaatcgcacccagggcaagctagaaacaaaatataattaggttgtggtcagaacactaaagaatcgcagaaaccaaaaattaatctgacaaggtcaaattgcagtcagttgtcgtgtctttttttttatatttgatagtcctttattcactgtcaataacactctccagaaatataatagctgtctgaagtggtaatgattttgagatgagacaaaaaaaattcaatatgaaaataaggatccaagacactcaatgtgaaaattagggggatggtcaatattgaatatctgttttccttcagatgccgaatggtatcacgaaataccgacaaaaaaaaggttgcacttcacaactatagggatcggtagaaaatctcgagattgtggaacggctttttcttaaaaaaaaattttcctgcgtatttgcctgaaaaagaatacgtcccgtaattggataggtgcggccttgcggagtatttttctcgtctgtacttcctacgtttgcaatggtttagtcacgaagcgaggatcagtgagttatcgatagcttggtaatgcttctaatatgttaatatgtgcaaccaaagatccgaccgggtgaaatatagtaattattctgcaaacactcagttaccaaaggaaagtagaaataggacgaaggggtcctgaatttatttagaaactgacttctttgctaaatgtacttccagatttttcacaagctccctgtgtctcttcttatggacagtattaatataactatttcctctttcgctaacttggctttctggggcttcctcctgggcactgttgtttggtgcaacaaagggcaaaacgatgggaaaaaaaagctgaaaaaggattcggagaaagtgggggcactaatgtgaactgaccttatgttgatagcaccggttgatcctatgccgagaatgtataactagcgtcgaaatggatgatgacgatgacccagtgaaatcgatttgtgtattgacgggacgtgatcttctttcttctttcttctttagttctttattccgattattatctaaaccctcagatactggctaagtggatagatcgacgtggggcccgatttcgagggccaaaaaccaaaaaaaaaagttgcacgtagtaaaccaagaacaaaggggaaaacactaaggtcaaagtcgtagctgtacgattggcgatttctgatatcggaaatgattatcttatcggcaacggtaaatacaatcagaatcgaaccaaaatatcaagcgttgagaatccagaatgaagtgagaaaaattattgatactactagaacatcaatacctcgtacgcaaataccttaacctaaactctgcgacaaaactagtttccacttttttgtcgaaaagtttcagttgttttatatcgttgaaagatgagtctgatggcaaacactcagcctatgcttttgcttcgtgcccaagaggttgcattattcgacattcccctaaaaaaattttcttttctacgtatatttcctttcccctgtctgttgaaaagcaaatcaaatggctatggtcgacataacgattatataaggttatcggtagttgagcttgtacaaacgtttgttgtagatgtctttctagtcggaatctgacgctctatatgggtgtacaaagaaaacatactagcaataaaatcaatcggcttttcctctcttcgaggtcttctgcttgaatcttattgcttacactttttttggaaaatattctacttcacgctcaggttaaacctgcgcggaatgtccgtaagggccagacctatattgacatattgttggtgagaaccgcaaatgatattgatgcattcaagcctgaaacaaatgcggaggcatcaagcattacaagtaggatatgacaccagaaaacaaaaaaaaaaaattcttggtcttgctgttcgtacctgtgcttttttcttggtatgctcctcgaaatttttttttcttagataatgtgcgccgttttttgttgtggtaatcggcgatcaaaaccgttgttatagggaaacgatttaatacataggaacctagagaccggtttaaatggtttgaaattttctgtgagtgaagcgcctcagctatttctagggaactctgatcgatatacgcatcgacaaagaaaaccgttacagtccacactttaccactggtatgctaagacatcaatgagatcaagtttgtaacttagtgtttgaggtaaacctgtttcactcctacgaaaactgcaactgtaacaagctttggcgttgctgctatttgtttatttaagcatcatactggaatttccaagacagcaatattgtacgggttagcacacttcttacgtactgcttactatgttgactatttgaaaagaagaatgaagtagtaccgtttcgaagattattttttctttgtcactatacaaatgacatgcttgtgccactgagcaatgtgataaagggaacttagtgttccggttctaatgttttctggttttgcaaaagctatgagctttagtttataaaaagaatagaagatattttagaccttaaactagcggtggcgtagagtgtaagtttgaacgttctatatacgtttctatgcgagtatttttttttcctttactacgtaaatatcgcttatgcatttgatgccattttcattcttttccggcttattcaaggctcgaccggccaaataacgaaaaaaaaaaaaaaaaaaagcatcaaatatttatcttgctaatacactggagtaactcagagtctttcttagctccacttgactaggtaagatgaagtatctattcagtgtaattgattatatgactgtttttactgtacctgcctcatttcggcttctaggctaccaaatgtaacgcctttggccgttcggcagaaaatcaagatacaactttgactgggaaatcctgggaaatgagcacttgacaattaattatagttccgttccctaggaaagaagaaaactactgggaaacagaagatatagaagatgcatacatcagtataggcgatggccagctattatccttaaactttgaacattatagtatatgtatttatatgtaagatgtgactgatattgcactttggtgcagaaaattgaaacgataactgcaacttccttgattttgctagtggtttataaatctatcatttccactttaccagaatcaacattgtataacaaaccgtaagtttcaattgatttgttttctagagctttctgtactgtatcgacacttagcaaactttcgtattgtttcttgacgttgagtatcgatagcagacgggactgtttctctagatcattttggtattctggtgagttaagtaaaactttgttctcgtggattaaatcatcaatttcttgcaagtattgatgtagatgggagcattgcaaaccaggcaattcctttctttgatccttcaaacatgtcttgataccaccacagtcagtatgtccgcagatgatgattttgttcacttttaagacgttgatagcaaactcgagtgtcgcaagacatgtcaaatcctccacattgactttgttagctatattcttaaacgtgaaaacctcacctggtagtacgccaacaacgttttcgttgtaacgagaatcagaacatccgataaagagagtgtgagggtcctgcccttgaccatttagagtgaacaagtttggatgttcattttgcatttcagaacgccatttctcgttcgcctttagataatctttaatattggagttggattgtaatgtgaacgggacaaaatcagaagcgacaggtgacatgtttacgtagtgtggtttttcttgtttggtcttatgtgatgactactatcacaaaagtctaagtttcgttaaacatattgcaaacctagacaggatctcattgtccaactcacttcctaatgcttatatataataattccacagttcatttgttagccccgaaccttaaaaaacacttacatcaacagtattcatggttttaggctcatctcagcagaattcagcatcattcccatacttaacgagaaataaagaaacaatttccaatagaaaaaaaggtcaacgaagtgcattacatcaacatttcgtaaaaatccaaaaagaaaaaaatacacaccacatagaaacagtggggagctgagaccgggtgattcatcacgttttattcgaaaccgatagagagtcacggcccgagccatgccttcaagtgtctgtgcgtgggataagagttttgaaaaatgaacaggaacattcaactggaaaagacgtcccgggatgaattgagtcaatataagaacttcggtttatctggtggggatacagagagccctgtagaggagaaacctatctatagccaatgattggtgctacgctggaaaaaaaaaggctcgagataatagtaatcacaaattatcacgctcgaagtccccttccttctgcaattgtctgcaatattcttagtggcgtcagtactgaccgacatcaacagtattttctttttccgtttttccaacatgatggaatagtgataattgttgacgtcaaccttacacagagatggaacgtgagatcagaaaaaaaaagtttgtaggacggtaagtggagagaatatccggtgcgttacccgaatatacgccaggtttagtttgcactaaaagtgggagatgtgaggaatacgtctgtatccggttaatcggaacaatacactcgcataaaaatgattccaagccaacccagctaggaggcgggggatgcggctgttatttcgctgtggctacaggcagtgaaggtcgccacttttcgaagagaagttcttgaagttacagaaaacacatcataaataggcggcaatcatgattatatgagtgttttggcgtgcgtatctttggttgatggaaacgctgagagcataattttgggcgttgtcatatttacgagtaacaccactttcacgtgacttgcgacttgggactagactggttttttttttccagtttttcctttccgcaaaagtcaatactaacctagtgaccaaaagacgggtaacaactctcttttgtcccaataccaataatgtagtatttcatttttaggggagggcatgggattgaaaaaaaaaggattcaagcaagacatctcaacttttgagataacacaaaaacgcgatctaggaactgcggacagaaatttgaagaaaaattatatttacaagttctcggagaagtcacatctgttattgtgtcactcgaaggtgacacaatctagcttattcgatttctgtctggttttttttttcctggctatttaaatttcccatttttttgtgtgatatatctgcaattgttatacttgttgctgtatcaaaagtatcgatattaatgagatcagtaggatagaaacgaaataagttgccaatatagttactgaaacttcaattagagtgtcttgtatcgctactggctcgaagattattatatttctgtgatagatcagacatctaattttgccttttttttgttttgcttgcatcatgaataaccctaatacgatgctaagtaaaagctcaagaaaaccgagaatacctaagcactcacattattttctgtccttcgtttgcatttcttcgttattagcatactatttccttttatcaccatttcaagctgggaatcacaatgcgaatcacagtatagagtgccctttatcaaggtcatctccactaattgaagtgtcagatttcaataggatatctgaattcaaattgcaaccaatcccagtctcgaagaacatttcaaggaatgatttcaataaatggttggaagaacaaacggagatttccttctatcatatgttcgaaaacatttgtcatgcagaaacatcagataaatttgataattgtactcctggtgttgtctttgcgtctccttccaagaacaaaccagattatttctatcattggattagagatggtgccatcaccataaacactttaattaatacgtatcttgatattgatagggaacggactcttgagacagtcttggattacgtgaacgcatctttggatttacaacataaatctaatcccagtgggccagctgatgatcctttgttcagaaatttgggagaaccaaaatatcatgttgataacagcgcttatgaacttgtctggggcagaccacagaatgatggcccaccattaagagctattgcattgttgaacttcttgaaccaggtagacgatggggaaaccgagaaatacaattggatatttgatgaggtaattgccttagatttgaagtttgtgttatataattggcatattccaacgtatgacctatgggaagaagtgcgtgcttatcatttttttactagtatggttcaattgaaggcgctagtagaaggtaagagatatcttttaacgtcggaagcaaaaggtgtaaaattgagcaagcagttgactatactattgaaggatattgagacttgtatagacaaaattgaggattttatcatcgatgccaattcagggtttataaatcatgaaaagggttacattgtggaaacccccagtattttggatgaaaggtcaggtttagacattgctgtgatcatggcaagcaccttgacacatgatgattctataaaagatatgaacaccgtttatgattccttcttgtttgatattgatgatcctttcatattgaatcatttcaatgaactaattgagagaatggcagtactttacccgatcaatcacaacagacttaatacaaacatgggagttgccattgggagatatccagaggatatttatgatggaattgacatctctgaaggtaatccctggtttatctcaacgttaacctctgccgaattgatttacaaattagtcaataaaatgtatcacgatgagaaacctttactcattgatccgatatcgaacaagttctggactaaattcttcgaatttgggaatatgaaggattcgctgatcttgataccatataatacattagcgttcaaccaaacgttgtacacaatattcaaatacggtgattcattcctaagcaaagttaacgagcatgtaagtaacgacggatcgatgagcgaacagttcaacaaatatcatggatacaaccaaggggctccaaatttgacatggtcttacggtactttcagcaatgcacttcgctggagggaaattgtcgatcgattcatccatcctattgccatataagacatggaatcactctttcgaataaaatgtaaaggggcaagttgttaatgaaaagtatataggttgaataaatactttgataatgataaattttagctgctacttgtatctgctttacttaacaaagaaaagtactgaatcctaagttcattgatcgttgcattattgactattaaaacatctataaaaaaacacaagcttaatacgagaatatttacatttattgaccgtctctaaaaagcttttccaacagcagtatggttaaacttgaccgtgttgctattactcaggaacttgtagacctaccttgttagcagtcttttgaactttttcctcttgtgacattttcaatcctggattatatctttcgatcaactgctcgtattcactttgattgacaacaaaggccgcaatatctttcaaatgttgaagagaacgcgggtcatctttcagcgatagaacaatatctttgagatgtttgctatggctgtaaaataatagctctttagatttcaatgggtccttagtcttcaaaatttcaattttttttccaaccgcactgagctgttttaataccttgcttcttgccattgcatctaggcccttctcctgctgttgtctcactaattggatcctattgtatgtcaataaggctatttgtttctttgtatcttgctgtagttgttggattttattgtgcttcgcactacggacaagtgatctcaatagtgacttatatgtcgataacgttagctcactcattgtatgatccttaatatattctatattatcactgctctgtgagataatgataagtggagatatcctataatgcctattataatatgtcaaggcagagtactctcataacatgctagaatcaccaatctaatacagaactcatcgaaacatttttcaacagtcaaatctctctttaactgtcgatccagatcacgtgaaacctttttcacgtttcttctgtaaatctgaagatatatttcattccgggtaatgattcgtgttttttttttgtcacttttctttattttcctcttgttcgttttttgactgactcaatgccgagaacggaacccaggtcacatgatcgcgactgttattatactgcagcgggaccgactttccaacttgaacacaggggaatcaaatgtgacctaaattttgttagaaattggcatgataagtatataaatacaaaatatggaaattgtccagagagatttaaaaaccttgaatcacaaccgctttcattttacatcaacaactgaaaaggaacactgtaaaagatcagtgaagaaagccaattcaattgcctgaacaactagcggatctgccattagtgttataactatcatttctattcgttttctttttttctaaaggttttgtgtttattttaaattcccttctccactaagaaacaatattccagatataatttgaagtgcccttcttttcgaattatattaagcttaaaacaatagtcattatatcagatcaataggttttctcatttccgagttaattgctcttttattttaacttaaaacccctcatattcccggtattacatactaaattacaagaacatagaaaaaaatgttgagacaaggtattgctgctcaaaaaaagtccttcgctaccctagcagctgaacaattgttgccaaagaagtacggtggtcgctacactgtaactttgattccaggtgatggtgttggtaaggaagtgaccgactcagtagtcaagatcttcgaaaacgaaaatattccaatcgactgggaaactatcgacatttctggtctagaaaacactgaaaatgtacaaagagctgtcgaatctttaaagagaaacaaggttggtttgaaaggtatctggcacactccagccgaccaaaccggtcatggctcattgaacgttgctttgagaaagcaactggatattttcgccaatgtcgccttgttcaaatcaattccaggtgtcaagactagattgaataacatcgacatggttatcatcagagaaaacactgaaggtgaatactctggtttagaacacgaatctgttccaggtgtcgttgaatctttgaagatcatgaccagggctaagtcagaaagaattgctagattcgcctttgatttcgccttgaaaaacaacagaaagtcggtctgcgctgttcacaaagctaacatcatgaaattgggtgatggtttgttcagaaacaccgttaatgaaattggtgctaacgaatacccagaactcgatgtcaagaacatcatcgttgacaacgcttccatgcaagctgttgccaagccacatcaattcgatgttttggtgacaccaaacttgtacggttctatcttgggtaacattggttctgctttgatcggtggtcccggtctagtcccaggtgctaacttcggtagagaatacgctgtctttgaaccaggttccagacatgttggtttggacatcaagggtcaaaacgttgctaacccaactgctatgatcttgtcctctactctaatgttgagacatctaggtttgaacgcttacgctgatagaatttccaaagctacatatgatgtcatttctgaaggtaagtcaacaacaagagacatcggtggttcagcctccacttctgagttcaccaacgctgttatcgagaagttagccaagttatgatcacatcaaggaaattatgacatctttttatccacacaaaacaaataaaagaaatttgatccttataatatccttctctacctcctagaaaacatgttttctttaccgtcctgtccctctgaatgaagacagtcacttccaacaaacatatacaatcttcaagatcaaatcaatagatgattatttactaaattccattacgtaactttttaaatcatatatacaatcacgacgacgttcaattcttttgatacagcatcaagtaaaaaacacaatccttaagtttcttccctgaccatagtaaatacaacgattatatatatagcagtttactagtggtggttgatgctcccttccaatgtgtttagtgttcttttggatgtagtgatcgctttcacattgcagcagttctcgagtgaaaaaatcatgtctattgtgagtcaacattagtgaataaatggaactgcttaaatttccctgacacctaactaagtaagctatcagctaatagtgcatatcgaaagaagatggatacaaagtaaatgcttctatttcggaccgaaaaggtaacatcaggccccttccatacatctcatctatgtgcctaatatgtcctggtttttgacatttctcgaattcgagaacaataaaaaacagtacacacaaatacagcaggcttacataatagaaaagactgacagctttgtaaaagttggaatattacagcagccatctctacgatggcatctcgaagaaacagcaagcagtaagaatgagctaatggatacagcaacccagtatcctgctctgccaagttcggattaggcaatgatatgctatgctatgcaatatcatgtcatgtgacgggtgacaatcgaactattttctttaccaagaaaaccactttttccaggaaatgcgctttagtggttctatccgaagacaaaatgttgccatcctgtagcctgaatgacactgatacatagcagggcatatattaatcttgattctcctctgagacaaacagtatatttataatcatctgtatcttagtgtcacagcgtgccacacagacataagttacgtattattgcgatgtaggaaataaaatggaaaatgagatttttccattagaaccgatctaacgtccattttgattgggtattattctgagcttcattctccgaacgatcaaccggtgacccaccggtgggtcactggtaggtaaagttgctagaggagatattctttgtctgacttcgggttttgaaccttctatttaggttgagagtcttagtatgtcccaaaaaaggggaatgtctgaatgtattgaaataaagaaatgaaaataaagaaatgccactttttcatgcacacataaatcacagcagtaggaaaactaatagagaatgattatggagcccatccaaaaactattgacgtattgtacaggtttctgaaaagttttcaaactgcactcagtgttgacttattccctacttgttctggggcattttgctttggtccttttcatgagatccacactcaaacttaggtagtaagtgatgtaagtaggtagcttacgttattgtttcccacagtatgtcgccttggccataagaaagctaatggattggtaatggaaacaatgataatatataaagagcatacaattgtacatcagactcaaccatgtgtgcaagtttacatttctgaccattaactattagtagcgttaatgaccagtaaagggataatcgtgaaaacacagctcatattcaccccggtatataatagttgacattgttaccaagttcgtttcatacttatatgcaataaaactatcctgtctgaacttatcttttccatctcagatctgccatacatataagctgggactttccaggatctaataagagcccgttcaaacactacttattacagtgttagggtgaaggacataatcaatttttttccggtaaaaatgacgtcttttgagaacagacttcagggttcagacaacgggtcagtttctgacgattacgatgtgcataagacgctactcaaagcacctggccaaaaacaccaagatgtggaagacgtagttgaagtccaaaactacggtgacgatactagcgtgtcttacaaggatggcctcacagaaagtgacgaagaagggcatcagattaaatacaagacttgttcatggcagcatactacaggattattgctatcagaatacatcgtcctagccatcatgtcatttccatggtcttattcggtgttgggtttaattccgggacttatattgactgcatttgttgcaattaccgtcttgtacacaggacttattgttttggattattgtgaacggttccctcatcttaaaaatgtgtgtgacattggacaacatctattctggggcagcaaggctgcctggtatgcaactgctgtttgcttcatagctaacaacacacttatccaagggttgcacgtcttggtcggcgccaaatacctcaataccgtcacaaatcattctgtttgttctgttggattcgcagctattgttgctgtcatttcatttgtgttttcaatcccaagaacattctcctccttatctaaagttgcatacttctcagctattaccatgttcatttcagttatcttggctatgatctttgctggaattcaggatcacccagctggctatgatggtactgctgtaacgtatcaattatggcctaagaagggaacaacatatgttgatgccatgggtgcatttttgaatattgtctacacttttgttggtcaaattacttatccacagttcatctctgagatgaaaagaccaagggaattcaagaaggtactttggatagtcactgcgctggaacttattattttctccttagcgggggctttgatctacgtgtatgtcggtaacgaatacatgactgcgccagcatatggatctttgacaaagacttacaagatcatttccttctcttttgccatccctaccatcgtgttcgttgggtccttatattctaacatctcatcgagattcgtgttcttcaatgtcttcagaaactcggagcatttatactctcataccaaggtcggatggttggcttggattggcttattgttattgacttgggtaggtgcctttgtgattgcagaggttattcctttcttctcagatctattgtccttgatgtgttctttattcgattgttggttcggatatgtattctggggtatggcatacctaaaggtaaaacaaaataaatacaagcagagtaacccttatccgtacttgactaagattgaaaaggttcatttcatcatagcgggaattctcattactatcggaatttatattttgggacctggtctatacgctactgttcaaagtatcatttacaatttccaatcagatgcatatggctcagtcttcagctgtgcttccaatggtatttaaaagaaaaaaaaattgtaacaattttcccttgtataagtagttttggataacttttaaccattccttgtaattcattcaaagttcacacacaactcatcgttaattctagcatactcgcgttgtgacctttacctgaaggaatgtaagttactaaaaaataaaaatatataaaaaatcactccgcgacggggaattgaaccccgatctcgcacgcgacaagcgcgaattctaaccattaaactatcgcggacaactttctacttttagagcagataagtctacctgactccaactatgggtacataactctgccccctcctgccctttaatttttcttctagatcgaccatctgcttgttgactcaaaactcgacactactattcacggcttctatgttttaacaaggcaacgaatacgagtcaatcacgttaccagatctcgcatactacataatgttcacaaacagaataataatgaatgctacagttataactgctgcggatcatgccccttatttctgaaaggaatcatcactctactagcagatatgaagttcaccaagtatttttttttctgtagatattctgaaactgatctggttcgagaaacacggggttttattgctgtctatagtgatgagaatgagaaggggctagtgtgcattcccgcaactgaactcccaaagacagttatacatctctcccacattctactgtattttgactcttttcgtgttctcattcactggtccctgtgaacacttaaaataaaaaaaaagtgataaattaatacatggcagtgggcacgtggcacgtgctgaagaaaccaattcaaaactgaagaaatgactgtaggaggaaaagaaaatagatggataataatttatatttcacaggaaacacgtgtgactgcagcaacggtggtacggctttcgtcatgacgttccttcaaatcgggcaggaccctaaagggctgagccatgattatcggaactgactgcatcgtttttgtagcgtctggttagcaagcaaatggcacagtttgcacagtttccatgtgttttttcttctagttaagaaaagatccttcatagtgcagtagaccctgagaacccttaggtttttgctgcctttgtttctgcgtttccgttgtgttttcaacattcaagagaatcaaaaggtagtaatttcttttgttttctgacatcgatgagttagatacgaaagactgtctatactcctaccatattggacaacctctttcactatcgtttctacgaggtggagacattgcactgtagttactgtgcgaaagagtaagagttttggtgatcaatggaatgttttgagtattggaatactacctgtgttctgtagcattaggttgttaattttaatacatggaaggatgggaaagttgggatggattgatgcccacgtttattttatgattattactgtctgcatgggagaaagtagtgctgaaaagttgttaatttaattcgtaaggaccccaccagggttcttttttttcctttcattttttttagttataaaaggcaagcgaacattgcaccagggagcaagtgtactcatcagcagcatctatttaacttccattttgaagctagctaccaaagaaagcaacagaacaagcataaattagtcaaaccatctgtcctataggcgttttttccttttcttttctaatatttgaaaatacgtgcaaattaaacgctgatcaaaattcagatctaataacacatcagtgcaaacaaactaaacaaaaatggctttgcaacagtttgattacatttttgccattacaatgctctttgcattcttggatgcatacaatattggtgccaatgatgttgccaactcgtttgcttcctctatttcatctagatccttgaaatactggcaggctatgatccttgctgctttatgtgaatttttgggggctgtcttagcgggtgctagagtctctggtaccatcaagaacaatattatttctgcttcacctttcgaagatgatccagctgtgttaatgttaactatggcatgtgctcttgtcggttctgccacttggctttcaattgcgacatctattggtatgccagtgtcatcgactcattctatcgttggtggtaccatcggtgccggtattgctgccggtggtgccaagggtgtccaatggggttggggtggtgtttctcaaattattgcttcttggtttattgctccaatcttagccggttgcttggtcactattattttcttgatctccaagttcctggtcttggatgttaagccaattgaaaaagctattaagaacgctttactactcgtcggatttttggtgttcgctaccttctcggtgttgactatgttgatcgtttggaagggttctccaaacttgaagttggataaattgtctggcacaactaccgcattggctattgttcttactggtctagtcgcttgtgctgtttacttcatcttcttgtacccatactacagaagaagaatcttgcacagagactggaccctaaaatggtatgatatttacagaggcccaactttctacttcaagtccactgacgacattccacctctacctgctggacaatctttaaccattgattactacgaaggtagaagattcgaagatgaaactgccggagatgatgaaacccaaattgaaacttcccacaccgccgatggaagagatactgtagagggacatattgaaattaacgacaaggaatctgtcaaccaaagtatcaaattggtgcaaacagaaactttgcaagaagaaaaaccaactaccaaacagctatggtggtcattgctaaaacaaggaccaaagaagtggcctctattactttggttgattgcttctcacggttggactcaagatgttattcattctcaggtctacgatacaggtgctttgtcaacagatttcaaggacatgtacaagagatctgccttctatgacaacagaatcgaattcatctattctatcttgcaagctattaccgccgccactatgtcttttgctcacggtgccaatgatgttgccaacgccactgcaccactagctgccgtgtatgacatctggcagaaaaacactgtggaatctaagtctgacgttcacacatgggttttagcatactgtgccgctgcattggtcctcggttgttggacatacggttacagaatcatcaagaacttgggtaacaagatgattttgcaatctccatccagagggttctccgttgaacttggtgctgctgttaccactgttatggcaacacaattaagtattcctgtttctactactcaagttgctgtcggtggtattgtggccgttggtctttgtaacagggatttgaaatccgttaactggagaatggtcgctttctgttacagtggttggttcttaactcttccaatggctggtctcattgcaggtatcttgaacggtatcatcttgaacgcaccacgttacggtggagattaccaattatcataatcatcagattgatattttctttctcatggcctcagcgccttttaggaactttcattaattaattgtttgtgcactagctagataatagtttatctgctacaaatatagaacatattcggtattatagattctgcaaatttcctcatatattagcctgcatatttaattctttctaagcagaatcgatatttatttctatcaacgcttattctctattgttttaagaatctgtagaatatctttaaaaacaaaacctttaaaatttgtatcgaaaggacatctcatacagtaaactattcactagtaaatcatctgagtaaacaactatcacggtgataggcatggagactcccagtttcctaaaacaatctccaccacctggttacatcgctggtataggtcgtggagcggttggcttttccaccagaggaagtaaagatgataaaagagttcctgctagattgaatagatatgggcgagatgcaccagatacttctgtaacaaagaatccaaatagatacagatcagcagtttcgaatgaatcatcggagaaacaggttaaagatgaagacgaacaagagatgagagtgtacgaaaagatcgaacagcgacttaagaataaaaaaattatcgacaatgaaacaagcctaaagacgaagccagatgatgaaccagacaagctatcttctaaatttgtagatttgaagcgtaatttagcaactctttctgagcaagactggctggatatccctgacgcatctgatatgaccagacgaaacaaaaggaatcgaatagaggaacaacttgaaaggaaaacattcgctgctcctgacactttgttccaggttaatgtcaacttatccaagttaactgaagagagggaaaagttacttgctgtccagatagataagagttttgattacagcaaaagtcaacttacggatgatgctgaatacttgaatagaatgaaccaagatgacaacactatttcatctacggatttggaagacattaggaaaaacagatccctattagccgcgtatcgtaaatcccatccaagaaatccagaaaactggatttcttcagcaagaatcgaagaaagagccaatcagttcaatcgagccaaaagtttgctagcggaaggttgtaaactgtgccctaaaagtgaagctatctggttagaatcgatacgcatgaacgcatccgataaagaatattgcaagaggttggttacagttgccttaaggctcaacgagtttagtgagcagttgtggttgaaggcaatcgccctcgaacaacacaatactgataaaattaaagtcactcgaaaggctctaattaaactaccactaagctctatattatgggaagtggcggtaaatcttgaaacttccactcttgaaaagctgaaaattttgaagaaagcagttgaattagtgccgaaggattcgcagttatggttgaagttgataaggttacaatcagtcgaatctgcagtggacaccttgaaatctgctgaagaacatattaaaaaagacatcacatactggcttctcaaatgtcaactcgaagaaaaaagaacgaccgcaaatctcgatacgttggtaaatatcatttctagcgcaataaaggatcttcatgaactggaagttaatccaactattactgagtggttcgaaaatgcagtcgctatatcaacagaaggattgtatccattaacagcgaaagcaatcatcacagctaccatcaataacttatttgaagacgcatcctcaaatttccaaagtctctcgaagctgttggtaaacgacaccacacttcagtgtaccttgttttcctccttcctaatcaaatatccaacaaagtactctatttggaaggagttcaccaatttcgccgaagacttttcgcggaaattagagctacacgaaacattcaggaagatcctctttacagattctcaagcggtaaagaaataccctgtcttggttttaatgtatgcgaaagacgtttgggattggggttctggttccactgaagcgttgtcgattttagataaagctctggtgacaaattcggcgtatcctgagttttggttggctaaactcaaaattttgaacagagatggcaaattggatgagattataaattcctttgaagaagccgaatcacacttggtagaatgcattgataaattagttcctttttacgttaagtgtttgcaatctaaaggcagtttggaaatagctcattctactgttgatatagctttggcacgtgaaccaaacgacaaacatttactaatcttgaaagcacagctatacaggcaacaaagggacctttcatcagcgaagcgtgtgctacagagggctacggatatttctaatcatgatccagaagtgtgcttggagttctccagactggtaatggaaacacaagattggggcaaagcgcgttcaatactcagcgtttctctactaaagaatccaaaatccgatacactctacgaggctctcattacattggaactgcaagtgaaagataacaaacaagtaacgtacctcatcgctcagggtctcaaagcgtgtccacacagctggaggctctggtgtctaaacatcagaacccttcctaaaaaatcactacgtaaaaccacattccaagatgctctcgaagctacaaaagagcatccaatggtgataactgagatcggaaaagtgttccaaaaggaacaccaatacgcgaaggcatataaatggttcataagagcctcggaaaataatcttcaatttggggacccatgggtatggctctacatctgcgagtcgtgcatgaatccagttgatttgcaaataaatgaagaaaaaacgttaaagaaattgaaagaaaatgaacccaggtacggtatactatgggagcccgcagtaaactcatacctacacatatcaaactctccgattgatattttgcacagcattatcaacaatttacaccaataattagatagaatgtaagattgtaagattgtaataataaaaattgggacaacactgatgcgactgtaaattgactttccgcattgtcagaagttccgttcctcaatcgtaactaacccagtatatgcggcagttctgtgtatttttccgttgtgatctgattctctgctatgaaagagtcagctcttatatctatcaaagagaactttttccagtggaatttgaaaatttgaaaacgaacaaccaaaatggaacttcgaaattgcgaagagtattggtagtcgacagggatcggaggtgaagtgaaaaacatcgatagcagctgttgagagtcttaaatacccgccgaggtccacgtcatttttaccagggaagttatatatatatactgataggtcagaaaaagtatgtcgttcggcaagggacgcaatgagagtttggattgtctcactccagcatcgtatgtgtctcaaggtgcggcacctgaggcaccagcaccgacccaaagtgtcagggcaagccagccgccactattcccagctagtagcagacatattctgtctccttcgacgttactagcgcatccaagtccgcattcagtgcccagtactgctactctgcttggactttcctctgaacacgtaatcactagtcctcagtcggttcagttgaaaaatacacctacttctatcggaccaagtccaagagatgtgctagttaccaatctatcgccgatctctgatattttacaaggtgatcgttcatctatgtcacctgcatctggaatctcttccgtagatgcatcgggtgcaacaccctcgacagatgcagatgggaaaatcgtcaagcgtaagtattctagaaatggttgtttggagtgtaagaaaagacggatgaaatgtgacgagggcaaaccgacctgttggcaatgtgccaggttgaatagaaagtgtgtgtatatattgaatccaaagaataagaaacggaaacccagaaaacccaagtctgcaggggcatgcgctacatgtactgaagatggtgatgagaagggaaaggttaagaatgatgcaacgatgaagagtgaaacaaatttctcactgaatagccatgttaatgattctttggtaaattcaggattgccaaacctcatacctgcaggtagcattaacgctatggatgccaatcttttgattcagaatctcaacgacattgttagtatgaagttgaatgactctttggttagcgatgaattaaaggatcttgagtttaacgacttagatctgccagatctgaactttccaatgcttaacactgcttcggagttttcatcagttccaatctcctttttggtcgataatacaatcactttcaacacatctctagaatcattcaagctaggtggtctgcatgataaatatctgcgaaccttttaccatgactgtttggattccatcacacctttctttcaagaccaaaataatccacttagagatatattactgtcattcggcaggaacgaaccatatcttctctcggcgattttagctgtgggcgcctctattgttcatcgtaaatcaaacaaaatggaggatgaaaaggcgtattgcggctatttatcacattgtttgcaactcctcggagatcagtttaaaaatgaaaccaacgtcattaataagcttgagcctattatcctaactgtcattttattaacttgggattgtatctatacaatgaactcccaatggaggtcccatttgaaaggtatcactgaacttttcaagaagatcaattcaggaaactcatcaaaagtgctaaatgtcgcgaaatgttggtttaaggttatggagacttttgcaagtattagtaccgtgctaggtggtgcacttgttgaggaaacagacttggacgcgatttttgatccatacgatttccagtatgtcgagtcgttgaagtctctaaatatcacaacctcgttgaatgagttcaatcttttacggggtcacaacgaagagtttgatcttgttatcaaagaggtcttcaaaagtttgaacttgattaggtctttggagaagacaagcatggacgggaataaaggtggaatgatcaataaaaacatagactatttactcttctttgactctcactctgaagcctatatgaacaagctctcttatttcaagatacagaaaatcatcgtggaaattgataagcagcttgaatatcaattcattgacaaatccggtgtaatacctgcagataatcaatcacatccttctaacagcaaaatactagatcatgcaatagatcttgttactctaaaaaatggagatgtcattgcgataagctggtatgatatttctcatcaaactcaagttctatctttcttattgattgttttactaaaactacttggtattccaaaagagtccattgctgtacagcaagttgttaagcgtatcatgtccttattccgatttttggatagtgatcaaccaccagttaatctaaggacctgttattctaactttgcagtgcttattgccgggctaaatgcgatcgaggaagaaacaaagtatttggtacgaaaatactacgaagttaacggatcaaggtttagaagattgacggaacacaacttgaacagattagaaaaggtatggagcggtaatgcaggaaagttcaatcttgaggatcaagacgttttgacatggtaattccataaccaaacttttgttatatttttttaacgttgtactaatatagcatataattttataaagacaatcgtattatagaaggtgaacgatattcatattaaaggtaatttgaaattcagaagtagataaataatgcataatttaagctgcccaaattttcaatatccatcagatatcaaacctacctgaaattgttcaccagttgtccagtttaattttcgaccgaatccacggtcattaatcccaaaatagagtctactacttgggcagcaataattgttgtaatatcgccgttcgtatcaaaagcaggaagcacttcgacaatatcggcaccaataatattgagtccttccaatccgtcaaggattgtgagcaattcccttgaagttaacccaccggtttctggtgtaccagttcctggagcagaagctaaatcaaccacatcaatatcaacagaaatatacactggtccatcccctacacgtttttttatggcagacaccacctctttcaagctgattatgtccaaatctctggcgacaatcttttcgaatccacattcgtaatcatgatcttcatcatagaatccaggtgcaatgtaaggggctctaatcccaacatgaatatttttatcatcttggagatagccattttcatgagcgaagtgcaggaatgttccgtggttaagaccagcacgcttggatatattacctcctaaaacttttggatcccaagtatccaaatgagaatcaaaatggatgacagaaaccttgccgtaatgttcataagcagaacgcagagccataagtgtaatcgtatggtccccacccaaggtgattaattttggtggctgctctttatgaactaatgatgagtggttgtgcaacgctctttgtcccctgtacaattgattaagagctagtttgttgtcaaatggagtcattgggatatccccacagtcaacgatcttatatccagagtggtaaggatctagtttacgtaacttcgatcccgggaaacctctaacaggagaaataccgtttcctaatcttctggagccttgtcttattccgttagggccaaatctagcgcctggtctataagacacgctggtatcaaatggggcaccaacaatagcgatatccatctccaacgaagtgtttctgaaacattgggcaataggggtgtgtgcaaaggaaacaataccagtgaactgaagtaaatcgtcctcaaaatcgtcttctggatattcattctcgtgatcgttgtagaacgaacacattcccctaaattcctcatccgtctcttctggatgaactttgatcaaaggccgggcagcagcaacttcactttcttctccattacgagactgtaacaaatctccatatagctgatacataagtgagtcctgttgcaacaattctacgtcaactggtgcatcgttttctatttggaatgaagatgacttttgattagttgcaggaacgaaatgcgaatgggcaattagcaagtaactaaatagcgcagtaatatacgctatattattagcgatcatgattaagacactgaaggatagggttcagttgattaacagttaaatatttgcttttcattcatgcaatagctatgctgccttttttctgtaaagctattcgagacgaatttttccttgtatttatgtaccgtcgaatttttttttttttaaagagtcatgctaggttcgaaatcactgggatatgcaggcataatctcaagttgctatctttcgggaaatatttcctaaattggtataagattgcatgggatatgtgaaagaatgtttcccataaacaataagcgtgcttgacggaaggaattaggtgacgacgggtcgtatatactttgagagaactaaatgaaatagattttaattggagatagtttagataagagataaaacaggcttgaatggggtagtaattccatggtttcaaatactgttgtcagcacaactgaagaccgtaccataagcattcgcctggaaattgtaaatgatactttgaacggtagcgtataggcctggtcccagaacgtagactccgaaaagtataaggaatcccgctatgtagaaacgaattttttctcctttatccaaacatggataaggattagtcttttcatatttagtttgctttacccttaggtatgccataccccagaatacaaatccgaaccagcaggcgaacaaggaacacatcaaagataatagatctgagaagaaaggaatcacttctgcaacaataaaggcaactatccaagttaacacgattattccgatccaacttaaccacccgatagtggtatgagagtgcatgtgttctgaatttttgaagaccttgaagaaaatgaatctggttgttatgttagaatagagagaccccacgaaaatgatggtaggcactgcaaaagagtatgctataatcttgtattttctcgttaaggacccatatgcaggggtggtcatgtattcattaccgatataatagtacattacagcacctgttattgaatagatgacaacttcgattgcagtgacaagcaagaacaccttcttgaaatccctcggtcttttcatttctgagatgaactgtggataagtgacttgagcagcgaaaacgtacacaatgttcaaaaatgcacccattgcatctacataacttgtgcccttctgtggccataaactgaatgtcaaatgagtaccatcataaccaaccgggtgatcctggattcctacaaagatgatagccagtattaccgaaatgaacatggtaatagctgagaagtatgcaactttagacatagaggcgaaggttcttgggatagaaaacacaaaagaaatgattgcggtaatgacaccaaatgcaacagtacaggtagagtgatttgtgatggtattaaggtacttaccaccgactaagacatgcacaccctggataagggtattgttggcaacgtaacaaacagcagttgcataccatgcaaaattacttccccaaaataaatgctgtccgatgtcacacgcatttttaagatgagggaacttttcgcagtagtctaaaatgataaaactggtgtataacacaacaccagcaacaaacaccgttaaaataagacccggtattaaacctaatactgaataggaccatgggaaagacatcatggctaagatgatgtattctgataacattagacctgtaatatgctgccatgaactagtcttgtatttaatctgatgaccttcttcatcgctttcttcaaaagcatcacggtaagataggctagtatcatcaccgtactgttcaaattcaccatcttccacatcgtgattcttgacgctgggtgtcttgatcatcgtcttatccacctcataattgtaaaaggtcttcccactctcagagccctcaggcttacttccaaatgaactcatctcgatcattataatagcttgattgccgtaactttctgtcacttataggtgaaagaggggagatattggaagatagacggtagattggccttaaagagaagaaatgtaggtattcttacttgattttttctagcgattcttactccgattgtggttgatttgagtcttgaaccggatgttatcaagtcttgacaagtaaggttgagctgaatatggattgttagtgttaatgttttccggtattatattatacatttattagcagctcgagatgaaggaaacatgcatgaagctcatcgaccaagtgattagcttgcctattttatatgaaatatcgttttccttcaatcctttatctcccatgcattcctaaagagagataaagtggagagattaacgttaagcacctgcttgctatctagtttggagtaacagttcatgatgtgtattaaagccaggatctgctatcaacagcgacctcaagttttaagtttttagatttcatcacaaagcaaaatgatacctaatatggaaatattttgcgtgaatgtgagaattgtattccgaaccattttagacttttttatacctcgacgatctgcatgatcagtggaatttctctgtttatctgcacgataagaagaatagctattctgttttgtcggcgcattagtgcctgatttcgataccccattcgggccactttgtgtggatgttctttactcagtgaagtgccatatcaagtcatttccctttatggtgatgaaaaaaaaaaggattggtacgtaaatttgatgtctgctcttgatgtttggttttatttaaaggaaggatgaagaagtaatcacattgttatcttttaccgttagccagtagttctgtaacggcgtctttcatcgatatttcatcgctggtcgctgttctagagaaacgatgaagcaatagtgtaatatcggtattactcttatatttaatacgttcttcaaattgtgatagaaagtatcaggattgcctgccaagaaagcttctagagatacaaatagagtctttaaatatttatgaatggtaccaggtgaagactcttcattaattgcccatagaggaggcgatagcggatacaatacagtggaatccttgaaaaaggatggggaaacgagcttagagtatgagttctggtatatgactaagacctccatcccattaatcattacgtttctcttgcaatgttcattatcgtcctcagctttggttttcgctggaagggttgggactttagaagttggagggatttcgatcggaaatgtcactttcgcggtcacttcggctatatttatcggtattgcaacatgtttggatacggtttgtcctcaagcgtatggtgcaggtaagtacaacatggtgggactgtatttccaaagaggtgttgccatttctttcctatttgccgttccggtaattgcattttggtataattcagagtacgttttatcgtttctagtggaggacgctgacgttgtccatatcgccgctgtttatttgcgtatcatgattcttagtcttcccggctatatcatattcgaatgtggtaagaagtacttacaagctcagggagatttcgtaactggacaaaacattctgtttgtctgtgcaccattgaacatattgttgaattatttatttgttctaaagtacaaatttggctacatcggatctccaatttctatggtgctgtcttatactcttatggggctcacaattgttgcatacatctgtcgtcaaatatattttggtaattcttcctgctggcatccgataactgggaatttctcggcaattttcaagaattggggtccccttattgctttagcgctaccaggtttgatcatgatcgaagctgagttttttgctttcgagatcatcactgttttaagcgcgaaattcggaacggaagtcttagctgcacaaagtattgtagcgaccttacaaacgtttttcttccaattacccttcagctgcagtgtggctgcttccaatagaattgcctatcacattggttctggaatcacggaaaactgcaagacagcgacgaaagcaactatgtttggggttggtcctgctgcaggaataataaatttcacagtgttgtacttcggtcgttacaagttatgttctttgtttaatgcggacccggttttggtaaataaagctgcaggattactctgtgtcgtcgcattaaatcaaatatatgattgcttcaatgtcatggctgcaggtgtcttgagagctcagggaagacaacgaatcggtgggtatttaaacataatggcgtactatctagttgggcttgaagtcggtattttattagcgttcaaattcaaaatggaagtgctcgggttctggataggtatcggggtaggtgtcctcttcctagctattggcgagaactatttcgtttacatatcaaactggagaaatattattagcaaatcgcaagacctacgccatgaagcgtgatcattgacagattatactgttttttaaatacagatcaaaaaaaatcagagaaaatattctagttcactagcaattatttaactgggccttgtatttacatatataggtaaggatacgttcttcttaagaaacttcttcgtgttgattatcatattaggccggaactaattattgcctgtttttccgtttttccgttttttccgattccttcgttgttttccttcagccagaaactccaacaaagatgcaaacatcttctcaaaataagggtatatataagtggtaaaagaatcatgcaattgaataagaataagaattcgctaatgaaagaaattgatcggatataattagagtttgaccattcggaagagagtgtttttcaaattgattgtattctcttctcagtgtgagcgagaaccatagtcgaaaagtgcattgagcctgtcaagaaaaattataaagaaagcaatgaccgaagtaacggaaactgttcataagaatggaccatactatttcgatagtaagatcagactatcagagggtatcagctatgcagctgaatccaaggcgctcttctggattgatatctacaatgcctacatccatagagtgactgatattgacgatatttcaactcatactgtatggcatgcatcagttgataactatgagggcttgtacccatttactactgatctaccagaacgtattggagctattttcccaattgatagagcagatggtgttgaagaggtttatttcggtgctaaatatgggattgccagaatgaattacaccactttgagatggcaatacttggttcactatagtgacagcggattgcagaaggattggacaggtttacgatccaacgatgggaacgtctctccagatggagaaatattcatcggtattatgaacgatttccattgtactgttgattcagaggacccaaagggcgcactactaaaagtgaacctccgtgaaaacatatgtgagttggtaatagataaattgatgattcccaatgcaatcaattggagccaggatggtacaacggtatatttcactgattctctaaacttctcgatttacaagtatccgtaccaagacaaaaatctcatcgtggaggacaaggcattattcattgatattaagaagttcaattcccaattcgattcacctgaacctgacggcagtttcatcgatcccgatacgcacaatatcatcacagcggtatggtctacgagtacggtgcaaaggtacgataccaaaggagatctaatccacaaatggacgttcccagagaccaatcgaatctctgcatgtaccttggcccaaggtcacatgtttgttaccacagcaaacgaaatcattgaagataacgcaagtccagagggccttggtggatccatctttaaagtagagaatgtctcgacttatatggggtcctcaaagaggaacccgattacggcagagcattagaagcccttatgatgcacgtgacatgtaaggagtttgcgttttcaatcccgtgatccccagtttttcaatttatcatattttactaagtattaacaaactactgacaaagcactgacaaagaatttataaacatagaataacttatgaatgtttatggtttatacgacagcgaaacaactatcaacttacatagtgtttgtaacgtcttaattaaggtgccttaattggctgacttttcattatgacaaattatattcgcatatttgagatttataaaatttactaatctatagcgtacttttgccgtaatactatatcttcctctgaagaaattgagaacagggtgatcagaattgctcatatagattattaagtttaagtaaggcttattggccctacttactatgtctattattaattttaggttattgatttgtacacctacacctttttctgggccccttcgaacctttttttttttacagtcttcccctttcttacatggattgaaactttcagtttcaggcactatataaatataactaaggtaaaaaaggaaattaaggaagccttctgcagttaaagggttcaattataataagtttagtagctacaattctttccatctctttcctgaaaacctcgagaattactcattcactcaccctaatataactcggaattatctaacaaaaatggctaaggttgctattatcatttattctatgtacggccatgttgctaagactgccgaatacgaaaagaagggtatcgaagctgccggtggttcagctgacatctatcaagtaccagaaactttatccgaagaagtcttgaagttgatgcatgctccagccaaaccagactatccaattgcttctaaggacactttgacggaatatgatgcttacttgttcggtgttccaactagatttggtaacttcccagctcaatggaaggctttctgggataccactggtggtttgtgggccagcggtgccttgcacggtaaggttgccggtttctttgtttctaccggtactggtggtggtaacgaaatgactattgtcaacgctttgtccactttagcccaccacggtatcatttacgtcccattgggttacaaaaacgttttcggtgaattgacaaacttagacgaagctcatggtggttctccatggggtgctggtaccattgccggtgcagatggttccagaacaccatctgacttggaattgaaggttcacgaaatccaaggtaagactttctacgaaactatccaaaagttttagaatacaaaatactctctctatatgatacataacagtaagatttggcagatccagcatgtgctttgcaccgtgccagagtactagaaaaaaaatatcaatccgaagttttctggcaggtcttctggcaagcttttcggcttatataacatgtatcctactgacattcacggtaactggtactgtcaaatttaataaaaagagagtagatgcccgctccgatcatgcaagatgactatataatgtgtctcgacatatgacaagaatcgatgacaccactattgactgaatcagtgtatggtatagatcaaggtagaactcatgtaaaatccagaactgaccaaagtgacaaaaatgaacaaaaaaaaaaaaaaatttgtcctgctaaacaacggataatcccttgaaatttagttggcccctgggccaactgaaatgttccagttcccgtttcatcttcgacaaactcaaaacgctccgctaccgtgcgattttcttttctcgctatacatgtataacttgggaagttagaatttccaaaaattgaaatgaataattaacttggaaaccagctccattaaaaaaagctaggagttgtatttcctcagtaaattaataaattcaaacacaacagaatatagcgtccgccatactaggatcggtttatactctattaccctgtaactttacttacatgtctaaacacggtctgttgtaagacgtaagcaccaaagcgtcatagacaaattttgcctccttttcgatcttttctattgaacaatactggcaagcggtactcattattctgttttcgtttttctttttgggaatttagtttggtttccttttcttttggactttggtttgagctttcaaatccactttttaaaaagaacaaagaacatatagaacatatagaacatatagaatgtaaaggtttgggggaataggaagaagagcaggtttaagtgtgtattctgattgcctcgttcgacgatttttgttttgtgctaagcattttcagtgatagttacaatctgctttaacagagagagagtcctttatttttcctgaagcgatttgtggtataaaggagagttaaacgatagtgtgatttttctatttggtctactttcattaggcaaaatcagatttctcactatactactgttggactgaaggatagcgtctgataacgcttgataccctaggcttctttcgttgtctggttctcagttttattttattttattattccattaatttttttggatcgcaggaatcaccttctaccatccaagcagagcttacttgatataattcaacctagcttttttactgcgtgatacacacgcggttgaacaagacagcagagtataatattcagaaggttttaccagataaacacagcacgctttgcattatgcagaataatttagcggcgtattttgctcaggggaatgcttctcaggggaatgctaccccgggtagagtcgcattgaacagaagctcatcgaatgatgaatacggaacaagcagtgtaaataaacaagtcccaaattacgacgatatgggtccttctgtgtctatggcggttcatgctgatgacgacgaccatttcaagaattctacgttcaatttgaaaagaacacgatccatgggactgttggatccatacatcgacgatactcagaaacttctggcaggttcgagctctgttgattccgataacttctctaacagtaacatcgatggcttgagtaacgacctcaatagtggtgacagtagcgggagcatgaataatattaacaacaacaacaacaacaacaacaacaacaacaacaacaacaacaacgacaacgaaaacaaaactgataatatcaataaaaacagtaataatacttcttataatgacgataacgacggtaatgatactacgcttaatgacaccgggctgaataaacacaatacaactgttggcggaaccgacgaagactacacagacgaaaacatgcaagtcgataactacgacgatgactacgaagcagattacgattacgactacgactacaaagatgtagaagattctaattctcctccagacccgggtactgacgatttcctaattcatcatgatgacaacgacttgatgtatgaacccaatagacatgtggattacttatctcataaatggaacgaaaacgaaatatctcagtcatggcgttatatcattttgaaaaagaaacggaaggacacagatttaatcaatgctgcaaggttggaaaatgcttcctggagaacttggtcaaaggctagaaataatctgaaaactgtgaatccagaatctttgaactggtcaaaggattctgatgtaacttggttatacggtccgattgtagtgggcgatcaaaataactcgacgtcgtcatcaaagcccacttccaacgttgaaataggaaacaatcatgcggccaccatggggtatggttccgatgatgaaaattcaaaaaggttgatccaaaagtctcagagtcccggtcctaaacctattctaaagaagagaactgttagtgaaattatcgaggaaaactccaaatggagattagatatagcaaggcagcacagaaagcaaactagtgacttgcatgctattttggatccgcagtcaagtcagacaacgcatgacgattatgatgctattgccgcgaaggtgaatgcacaatattacaaaaatatccatacaccgcctgatgaatcggtggaatctatttcgcccgttgtgaccgaaacaaactcgtcgatagtaaataccactccaggtccaatctctggctctgtgatagaaaccccatccgcaagatctgatcctcccatattatcatcgattcttacatcatcgatgaagcaaaagcaaaaaagggaaagacatattcatttcaatgaccgtgtcgaacaatgtattgcggttaatcataaccccatagacgctaatcctaatgatgacgaagtcccaatgacaaataccgattaccactctgacgatatgtcggacggtgccagatcttcgcatcagtattctgactttgacgatggatatagaaattcaggggccaacagcgtcgaagattacgccgatgacgaagatgatgaagacgctgacagctacgattatgatgaagatgacgacgaagatgacgaagatgatgggttatttatcagtgcacatactagaaaaaatcgaaccaattcgggggctagtgatggcacagatgttgcaaattctttaagatcactctcactatccaaatttccaaacgcaactattaaaccacttccagccactactctaaactacggatctgacgatgaatattatgatgaagacgaaaatgaatggtattatggtaacgcagtatcacacaatgtgaatactagcagaggatttgactacatgtatgattataattccgtttacacgggggatacatccaactttgtaactgtggacaattcgtgtgatatcctcgatgtaccggatggcattggattagatactccaatacaggacgcgaatgacggatatatggatgatgactcaagagggaaaatatatacataccatcaaagccttccggtacaagatgataacgatgaacatccggacaacgaattcatcgcagattcttcccaacctggtttcagtcatgatgacgaagagcatgacgataacggtgaagaactagagcttactgcaaaagacccactatcattaaggcgaacctcatctatagggaagtctagagcaaattccattcatgattttatcacaccttccaattctgcatctcctgttttaaaacagacacatagcttcatcactggagaacctttatctcaacacaattcgacggtaagaagaccaccattaaaatctccttcatcgggtagctttttatttggatctgattctgattctgagtgatcgctcaagtgctcttaggtatattcggagttcattttttttattgaggttaaacttaaaaataccactctaccagcatatatatttttttttcactacgtaaatagtattaattagaagaacaacaatttttcttggttttatccatctgcgtagatctctcgctcagcgcttaatgcttctattgattaacttgctacggtgttttatttatgttgagagagtgcgcttaattatatactcaaactaccatgttcactttcttttagaagtatcattgaatatgtaaaaactgaaaatcgattaaagttcatattgtaaacagatacatacacctttaagatgcatagcaaagaaaaagctgttccaacagactataaaccagcgagttaactatgccggataggttactgggaagtgagacaccagctctatctctaactcctgatagtaggacgcaattaagtcgatctccactattggtgcccagtcatgcctcagatgatgctagctcgttgaacgatgatctatctgtattatctagaaacagggatcaaataagggacagtatgtctatgaggcgtagtagttttgattccacattcaattctttttctacaacgatgcatacccaaaaacacggtcttgattattcaccgttggttgataattcaatatatgaaattgtgatgaacaccagatttaaaagatggttgcggcacccaaccaccgaggatattccccctgtagttctaagcaagaacgatattaaggataaatgggacaaggatattaatcaatacagagatgacattaaagacgaatatagggtgtatcaatcgacaaataatatatcaaagttgaaccgaatggagcaaatgagatctattgatcatgataaaactgcccttggattgcaaaatacgaaagccaaggcatttgaagaaatacctgaattctattttgataaggagttcaaattagatcaccccaatttctttcgaatgcttctacgagattttgagtttgatgccaatcaactactaaatgatgatgataaagttagaaatgacagctatgaagagcttcaaggaagattggcattctacttagatactgttgagggactccttgtttctgaaatctccaagtctatacaaagcttttttgacgctttggaagacgtcgataagattagagaaaatgcgacagagacaatcaacgagttggattctgctgctgaggcccttgagaggataaatggggataaaatctcaaaaagaattgagatgattaaagatctcataagaaggaaaaatgtggaaaagttacaacaggggatcctacaagtaaaactagcgaaagaaaaatgtgaagaatgtaaagaaatatatcaagaagaaaaactacaagagtgtttgaaattggttaaagcagttgagaacttaataaatggtgacaatgatgatcccactgtcaatgattggacctctcagtggccgtacaaactcacaaacatctcaagtttttctagtttacagggcataatagacatgctaaataatctgaaggttgacatcgggggatcttactcattgagtctggttaccgtactattggaagatttgaggacgtattcgaagtctcaatcgaaaaatgacacgatcatcaaattgcaatctaggaaggataagaacaaacctcatttaaagatcgatgagaccttccgaaagcaaatcaaagaaaatctaatacaattaatcgattgtgatcagttggttccggcagtgaagctatacgaggataaatttatagcagagttgaaatctgttattaaggttaatctaccgcatgagagacaaacacctgaagagtcgaaagatggctctaaaccaactgccgccaatgggtcaaggctatcaaagttgattcaagaacaatcatctcaagagttccaatcaatgcttgtaaatatattcacttctgaaatcgaactattgaagaggttaacgcggcatcagaaaatgctattagacatttcgctaagtgaattaccgacaacggcagagcaatctgataagatgattattgatcttgatattcggaaaagcgttaacgagggtataaggatagtacagcttcgaatggggaaaataatctcagtgagacgggatatcacatgtacattacgtttcgatcatttccttcagttctacgagatatgcatgcttttcatgagagagtgtgaatctataagcggtgaatttctaacgaagtatctttctgacgtattgaacctccaaatcgatacatatttgaaatctttacaaaatttgaacataagggttttgaaacaaaagatcgatgtagagagatggacaccattcatcgtcgagcccgaattgcaaaaggatgtcaatgatattgtatcgtgtattgacattgatccgtcaaattggacacgattcatcgagttgaacaaaccttctccattagacgaaacaaaggatgagaagcaatcctctaccggtcacaaaaaatccgttgtcttaggtgataagacattcgtggcaagcgaggctctaatccttgccatcaaaatgatcaaaactttattggtactcgcctcaaacttcccatcacagtatgcaagacattgcgaacgtcaattgtccgatgtcttgaaattcttcaatacaaaggcaatagaatctatatcatcatcactgacagacagactatctacaaagacagataaaaacttgaatatcatggccgaatcacttgattgtctagcggaaataacgctactactacaagggtatttccaacgtacgctgggatctaagacagataagtacgaaaacatctggaaacaattacaacagtccagtgagaaattgttccaaacaaacaatatcccgcctcctgtttaagacaagtactacccatcgggtaaacagttcactgcgcatgatagaataggtgatatctcagttgtactgaatatttatgcatatatattagcaatatgaatcacgtgatagtgtggactcactatatgcgtctgtgtatgtatcgttaccctgctttccgtataatatgatcgcaatttctaacgagggtcaacgttttccaatgaacatcatgaaaacattgacccaacgaagctttgaaaagttagagattctgatacttttgaattagaatgttttgttttgtttaccctgacaaaacaccaaagtgatagttttacactggtaccttaaggcgtgtgagagtattaatcactgttcaagtacgcgcggcatttctggtctgttgagcgagaggcaagtaaactacggaagagttttattgacctgtattattagtaattgccactttttttctaaggtatcaatcagtcttattgtctgggtattcccatcttaaacacattgttttaggttaagcagagcatttatatccagctcgtgtccatattccattgtgattcaatcgaggtaaccgggtcttgttaaagcttaattgttttcattgatcatgtcgcagaacgatacgaaccatgagtctgttgaggaggctgttttcaagtacgttggagttggcctagagaaatctggggaagacgacgctgtgaacaagcagaagtccgtagattggtttttgaaggaacaagaccaagaccaggaccaagatcaggatccgggcagggaccaggaccaggaggataatgcgaaacatcgtgatgctaacgatgtaagtgcagtcgctgcagctgctgtggcagctgctctttctgtgaagaaaagaggccgtccaagcgagcaaagtagtactgggtctagtggcaagggtagtggttcttcaggtcagaataataagaagtctaagaagaataaaaataagctacatctagctgctgtggatcctgaattagcatcgttagatgataatttggtcgatgggaacgattcggaggagcaatctcatcaccaattggtccataaggcaatcatggacactgataacatcgcttctcaacacccggatttccaacaatatttgaacacggaagacgatcaagaacctaagaaggaaaaaagcgaagagcgttcgtatggtgacctttccaacatagacgatcatgtagatgacgtctcagtatctggtagcatcccttcacaggtaaggctgaagaaaactgcggaagtgttgcctaaagtgctgtcatctgaatctcataacgacgatcaacaagatgatgtatcaaatttgattcaagaagctgctgccaaagcttcccatattatcaatccggcaacccaatcgaatggtaaatctttcgatgagtctgaagaagaagctctagaacaattcatcaaagaataccaaaagatcagaggcctctcgagacgtcaaatttgtgaaagaatttggtccaacgaaagaaggaaagatgacttctggactaatatctgtagggtgttgccttacaggacaagatcttcgatttacaaacacgttcgtcgtaagtatcacatttttgaacaacgtggtaagtggactcctgaggaagatgccgaattagcaagatggtgtgcagagaaggaaggtcagtggtcaaacatcggtaaggttttaggtagaatgccagaagattgtagggatcgttggagaaattatgtcaagtgtggtccaaatagagccgccaataaatggtctgtggaggaagaagaaaaattgaaaaatgttattcatcaaatgttggataacgccagcactgcgtacgaagatggtgaagatgatgaaatgaaagattcatctactaagatagaggattctggagatgctgatatgctggatgttcaggattctgataagaaaccctctatttcgaactctaaaaagaagccagccgcaaaagatattataaactggactgttgtaagtgaacaaatgggaggatcaagatcccgtattcaatgtcgttataaatggaacaaattattgaaaaaggaagccttgaataaaatcaaaaacatctcagatgacgataaattctggttgctaactaaattaagagatatgggtttcacagaggattctcaagtggattgggaagaattatctaccttaatgcctggtagaagatggactggtactgagttgaaattattatacgaaaaagtcaggactacagttcgccaatacaaacgaaaaactattaatgtgatctgtaaagaactcgttggatatccagaagcctcattgccacttgacgatgaaatacgtcaacatcatagcggtgatgatgaagataaggattgatcctgatcaatacctacaaaataacaactaaagagctgtcatattttattatgtccactctttccatttggtttttgtaacatttcatgataccttgtacctcccttcaagaaaatattcaattgtaattttctctaacaaacttcatttttctcagaatataggatgaggggcaggtcaccacgttttcacttacctgcgaatcataaaacttagttggttttatttttattatatttaacaaaggttagtattttttatatataagtctgtattagtatgcgataatataaaacaattatcactcttccataaccaaccaacttcatcaacgagcacattagctcaatggttaatggattgttatagcgctagcatgaattttcattaacccaagttgaactgaaatagaggcgattttagttttttttatctgtccagttactttgattcattaattctggctattttatatcaaaagcacaacgataagaaggaaaggtaaaatatatacagattccttctgccgagagatctaaaaagtcataatcttgatgtatgtaccggatacgtatgaatcactagaaggctctataatacacttaattcgaagtaaataaactgataaagttgaaattgcaaatcatttaagttaacgaacaatttatgcgcaggaaagtgatcgtaacgcttctacgtttagtacagtagtcagagaaaatagtgttcttttgggtatcaaaaaagatgcgaggacatatttcggaaatgatcgtgtaacaagacagggaagctctgaaggcccgttcatttaggagggttcttgggagtattgattagaaagctaactttcccgggtttcttactaccatctatctccagcatttcatttggttcattcctacgtatagtgaatgtactcatttctggaacggtcatagcactatgggctctcttgtgacccatcctataattaggcaggggaggtacttgttcgtaaattgccggaggaatattttgagatccataactaatgggtcgttgatatcgttgagggtaatataaccctgttctattattactcagggatgcatttggagatgcatcgggaggcattggaggtggaggaaagttgtatttcatttgtgatccactcaaactagggagaggacaaaattgttgttgaccgcccggcggtagcattggaggtggaagttgttgccgttgttgttgttgttgttgttgtaatagcggttgttgattaggtttttgtagggatgtcattaactctacaggttgagagagtgtacgagaatgataagtaggaacaaactggggaggaccttgaggcggcgcttgcggcagactctgaggggagaattggctctgttgaatcagaggaggaatttgagattgtacagcttggagtggcggttgagcttgagtttgaggaggtgtcacttgaggccaatttcgcagttgctttggagaagttaattggccatttgcaggcaccagtggaacaacacctatcctttccaagttagattccagctgacctggtgatgattcaactaatgctaaaattacttccgatggtaaatttaacgcagtgattttcgttaaaatcatatctaacttgtttaaattctctgctttcaagcgctccaagtctgtaccaatctctttttttttcaactcaactaattgtagcaataactctctatcaataggtttcggcttttcgccattgctaccataattaattcctaaacttttcattacttcagcgtacaaactatcatcaacgttctgctgaagtatcgattcttcatcttcagtatcatattcattagcatctatccttgaagacatataaggcaaagtactcttcgtatacttcctaagattctataagtccatttagagaacttaagtcgaatcaagctatttaaagtaaccaaaaaagttccaatcaaataccgcgtttgaaacgactacctcgattataacaagggacaaaacctgtatcactgaaaaaggttagagtgtacggcagtttgaaaactagagagcttagattcaaatgaaaaaactagtttccacagcctcttttaccaaaataaaccgtgtcccacttaaatgatatattattctcaaattaatgtacggttaggaaaaaccaaacacaaaataaaatggttaattccgagatctatcaactgaacagaattcttttttaacaataacgctctcacgatggaccagcaacgtgaaatatccctagttgcaaaagatgaacctttgattctctcttcagtaatgtattttcctcaaatttctcaatttgatgggcagtaggttcaaatcctttaacaaaaaaccttattcctaaatatatatcatgaaatttaatttttccttcttccaactgtctatctgggaaatttctgagtaagcgacatataaaggaatgtagatattaagtaaagtagtaatatatccatgtttggtcgcttggaatggtgcgcatcattttgcgatatgaacggcgtacttatttcatcttatgtttttcagaaagcgttgctcgttcactgtttgtatacatgaaatacagaaattttattttagaatgattgatggtacaatccacaatttattgttacataaaatacttgcgggagattaagtatttaaattagatcaagtaaaacggtcagcgatcgacgtttaggagtaaaaaaaaaataggaaacaagacgaaggaagatgataaaaaaacgggtacaccaaaaagaaagaccatgtaagatatccgatatttaatattcttgcgaattcaatccatttttctattctgttggcgtacataagtggttcctgcccagttggaaagttgttcgtttaagaacatgtttaatttcagcttcaaaattccagtgggatgttgatgtttcataagagatgattttaaaggcgtgcttatgatgtaaaaaaaaacagacaagtagtaagataactgaatgttgtgttcacttttgggtcttcgccgggttggaattgagcaactcaattcttctatactcattcagaatgaaatggagagtgtaatgaaacatcggaagatggtgccatgccaaaacgtacgagacgcaatgagggtacattcttataggtcgattgaaaatgcttcgtgctttcatggagatagtactcacaaaaatatgcacacacgcacaacatgacaccattaatgatgttagttccatttcaatttttgacagatacagaggattcagatagcagactagggaagaaaagaaaaacagcaacggtaaataacatcccgccaatgcctctgaaaagagtcattaatcgtataaaacgaaattagcagcaccagaagtcactgaaacggtacaaccatcgctaccaccgttgtaggaaccgttttcgtaaacacattctccgatgacgctaccaccgtcagctgcaacaatcttgacgttgaagttggctgcttcacggttgtttgggtttggaatcaaagacagataagagataccgccagtggcaccagcaccgaagttcaatggagcccagttaccaataccagacccagaagtaccccagacacaaccatcctccttagaaacaccagcattgttaacgtagtattgagccgatgtcttcattccttgccatgtgtagtatgtatcctggtcgacaacggtcaatggtaacttgctaccaccgttgacaatagttgggataaccatgttttcagtacctgggtaatcggttctacagatggagacgacgtcagacaattcgttaacgacgtaggcactgtcaataccccaagtacacaagtacttttcgtcagtgttggaacggtaaagcttaccattcttacatagcaaaccaccgatggagacaccatttgatggttgatcagatgggtattgggtcttggacatacctggttgacaagcgtaagaacagtaagaaccttctttacaagtaccaccggtagaaccgtccgaattttcgataccggaccaaccaccgaatcctaaccaatctaggtagacaacaccttgaccggatgggaattcgtcacaggacatcacaccgtcttcgaattcctcagttggagaggagaaccatgatagatcaccggaactgctggtagaggttgaagtactaccagatgacgaagaactggaagattgggaggaagtggaggattcagaagcttcagtggaagattcagtagaggattgagaagaagaagaagaagaagaagaggaagattcttcttcagaacttgaggttgaaggttccaaagtagtggtttgttgatcctcagtggacgaagtagtagctgcttcttcggtggaagtgacagtagctggagcaatggtttcaccctggccgttgacggtaacggtttggtaaacatactcgacagcaacagctctcttgtgcttgtgatgagcatggacggtagttgagcagtcctcatcacgcttagcatgagcatgaggcaaagcagataccatagctgcgctaataaaagaagcggaagctaaagcagtagtgaatctcatctttaaattaggcttttaaaaattaacaaaggagtgtattgagtttctgtattgaaaggaaaatgattaattgttagtattagagaacgatgtcttttgaggttaggggggatgggatgagtggggaatagacacaattccaatcgaattcgaatctgtgattgatacactggaaaagaacgtacaattgaaggaaacagtgaaagtattctgcttttcctttaataactgaatatcaatgtcgctggtgctttgaaaaaatgagtaggatgaaatgtgttttatatttcaacaccgaaacaattctcgatagaaggaaactagatggttgagtttgtctcgcttataggcctcgaggatccagcctgaaaggtaaatcaaacatacaatttgaacaaatatgactggtaattgaaatcaccactcaattgcaaacgtatatataataaaacccaactccaaacaaaaaccaggaaacaataaacgtaacaaccatgtcgttgttggacatctcaagaattttttttgggaaatctcaattaaccaccttaaaacgaagccattttccagttaatttttcgagcaccacttgtgcgaaatcacacacatcatcgctgtatctggtaacagaaaagggagcggacctcagaagtatcaaacatgccaaagaaatgatgcgggtcgtgtctcgaaaattcacaccgtttgattgtggcactctgttccgctgaattctcacatcgcaccttttcttgcagtacctgtaacttccgaatttggcaagttcgcgaaaatttaaagtttcctcgagcttcgcctgtttcaccatttacggcatgaaaagggaatttaaggttacccgtatttcagatttagaaatgaaaaacgaaaaggcgcaatagtttccgggtaacggaaagagacgtctcttttcgttaccctaccacagtgcacttgatttcggaataaaatctctgagggcttcggccaggtatttctttgttagtcaatgcgagattgatttctctctcaacaaaaaagaaaaactgtatgaggtgaaaaaagcactggcaaagccagttaatcaagctagtaccgcaagcaataaaaatattcagtttcgaatccgaccctctgtgtatctgaaaaatctctatttgattcccatccgcttggataaataaaaaagaaaactctgtagtaaagaattacgacataccttgtaatgtagaacagcgaatgaatagtcaatctcggagaaagcgacttttacttttgctaaaacgagggaaattctgcaagcgtgggtcttgtaagtgacaaatagatagtatctgtacttaaaagtgtaatttcaaaggaacgtataggttatgggaaaaaaaacgggcgcaaagaaatgaatcaagccgtttttaataatagtctaaggaatgtaaagcagttggataataaacaaaatttgttgcccagtcgcagtttgctgtttctaatagcgtgaatgagtgtataggttagttctattggtgtttcttgtggatagtttgagctaaagtaagttatgctcgaaggccaaaaaactaaatcattctgtgaaaatcatatttacatatatatatatatatatataaatcatatcatggatacatgatgtttgcctcctaaaacaatggcagtacatattcaatataaaacaattctgggtaatttctgtaacggaaagaaaaaaaaatacgctcgagctagacttctgtgaaaaatctcggaattacagccatcccgatgacgcgagaagtaatagcagtgcagctcgttctgagaaaagcaagttaacttattatataatcaacagaaatttcagaagctttcttttcgacgtattacccggattcatacttccatcatgtttgttttgtttttgtttttgtttgtactgtgcggggttttaactcaatccaagctctcgctcaacagttatagcgcctgttctaagcaaaaatgtataacatgattctatggtaaacaaacagactgcgcatagtgcagctgaatttacttcctaaaaggaacctgttcccagcatctacaagggttataagagaacagtaaacgaaaaggaaaggattaagggggacgggatacactgttgttgtttcaggaatacctccgtgcgcgtttttttgcttgtttgtcttgctgggttttgaagtatggaagtatgtttaccgtctggatattttcattaaatagtacgtaaagagaatatcatgtacatatatatatatatatatatatatatatatgcataataattgactgtaaatggctccaatcatatgtttcagtcatgtttgatagtattttcaagaagacgttgacgttggcgttggctttgcaattgacgtttattcaaaacggaatacgccggatacagtttgaatttcttgcgtaatccccattctagcaatgcgtatggaatcagtagcattaaccatttcactaccgtggccatcgttccccggtatatatccaccgggtcaatgctgccgttttcgatatcattcaccgtttctcttgcgtaatcagctggtgacatcggttgattcttctctgacatcttcttacgggtttcaacggctttgataccctccgggaagttgaagatactaccttctggtaatgtcttcttatcagcgatgtctgtggctacacctcctgtaatcatgttaatgacacgtacgcccaaaggacctaattctccgtgtaacacccgagcgtattgatgaatcgcagcctttgatgcgctgtacactgctccaaacggaaatggacatatcccagctaatgacccagtgaagacgattgtccccttagcgtttatgattaatggtgcgaattcacgacatgagttgatgggtccataaacgtttactctgaatgtattatcgatgatttcttcgctcacgtctattgcgggcagagagcagctttggccagcgttattatataatagatgtagcttctgatctggtaattcttgctccaacttcaacttcaactgggtgatatcattctgattcgaaacatcaagtttcctagggatgcatctatctccaaactcggctcttaattcctccataggatgtgttcttctggcacatgcgtacacgtaccaccctctcctcaataactcctttgtgacttcataaccaatccctgatgatgcaccagtgaccaaagcatattttgtctcactcatattgatatgtttttgtgctctctatgaattagattatcttttacggtattcgtaagggactatgcttagagtagaatgtcgataagctttggtgacttcacttttgctagtcatcattaatcctgtgttttgaagtttccaatttttatttgatgattttttttttttttgcttgttatagtgtatttcccttttatttccttaaagaaatgtaatatgaatggaattttttatactaatataatattacatatttttataaaaataataataaataaatatcatattacgcttacatatgtaaaatgaaatcaaaactttctaactccgcaaatttgaacaaggaacaagcaaagctagatcaagaactcatatccttcagtgtttctgagatttcttaaaatgatgaaggaagaatgaattatgatgaatgataattttcattgtttgttctattgatgatttgatcattaattgcttcatggaagtctgtttgaaaaatacacattggtatttttatatatatatatatataaatattcttcatgataaattcataaacgtagtagacagtagttaaagaaatatatttgagttttggttcttcgaatgcagaagcgcaaaagaattttttctgaatatgataaagcataacagtaccgtatcaataaaaagttctcatgaagccatagccttccccataaggatgacttttcattttttttgtgtttcgatgagctttttatgaataaaagatagcagccaataatttgaagaggaaagaataaacgcgcagtaactaacctattggccaaagacttccttcaagaaagcttcttcttcggcgttgtgcaatgccttggaacccgcagcaacggaaccacttgggtttctaccagcatatctaataatagcatccttgtatttgtcagtttccttcaaggtagtttgcaatcttggttgagcatatgcccatccacccatgtttaatggttcttcttgacaccaaacgatgtcttccaagtttggataggtgtttaaggcatcacgcaattgagcgtatgggaatggatgtagttgttcaatcttaatgaatgcagtgttcttgtcttggatagtttcacgttttttatgcaaagcagtgtaaacttgacctgacaataaaacaactcgcttaatctcttcctttggtgcaatgctcttacctaattcgacatcttctatgatccattggaagccaccttcggtgaattcgttcaagttggatctagccaatgggtgacgtaacaattgcttagagaagaacaatgccagtggcttacggaattgtctatgttgttgtcttcttaggatgtggaataagttggctggagtggttggataaacaatttggaagttacaatcttgatgttgtctttgcaacttttcttcacttgggaaatatcttggatcttcgttacctagttgcaagaatctctccaatctacctgaagaatgctctggaccttgaccatcgtaaccgtgaggcaaggacaagactaacccggatctttgcttccatttcacttcaccagcggcaatgaattgatcgatgatgacttgagcagtgttggcgaaatcaccgaattgagcttcccaaacaacgaaataatctgggttagtcaaagagtaaccatactcgaaacccatacaaccgtattcagacaacgaagaattacagatggtgaagttagcttgtttttcagacaagtgctttaatggagtgtaagtattctcggatttttggtcgtgaagaacagcatgtctttgtgaaaaggtacctctttcaacatcttcaccagaaactctgacgtgattaccttccaacactaaggaaccgaaagctaatgcttcaccggtagaccagtcaataccttcaccggattcaactgctttacctctgttggttaaaattctcttcaagttcttatgaacttcgaagttctctggccatgaggagatggtcttaccaatgttcttcaaagtatcagcatcaacgacggttggttcgtgggataagatttcagtagctaaagcctttggagacttgaaaccttcccaagcagcagttaaccattctcttgaagttggcttatagtcctttgccttctcatatgcttcctcgaatagaccccaaacccatttcttatgttcatcgatatcttgcttggtgaaggaaccttcagataccaacttttccgtgtaaacgtcaatgacagatttttgcttagaaatcttttggtacattaatggttgtgtgaaggaaggttggtcagtttcattatgaccatgctttctccatccgacgacgtcaataatggcatcagtgtggaaagtagctctccattcagcagccaagttgaaaatgaatgtaagagcttcaacatcgttggcatttacatggaagataggagcatcaatggttttacccaaatcagatgggtatagagttgatctagcgaatcttggatcagtagtgaaaccgatttggttgtttgtgataacgtgaatggtaccaccagtagagtatgctggcaaatgtaggaaacccatggtttcgtaaacgataccttgagcagcgaaagcagcatcaccgtgcaataggacgctgatggccttgtcatacttgccaatatcgttcttagagaactggatggctctagttctacccaaaacaacaggatcagcggcttccaaatgagatgggttagcaaccaaagacaagttaacgtatttaccagaggtagttggtctttggtaattcatacccaaatgatatttcacatcaccggaaccctcgtattcttctggagcaacagaacccttaaattctgagaagatggattcgtttggtttacgcaccacattagacaaaacgtttaatctaccacgatgagccatacccaagacaacatcttcaacacctaattcaacggaacggtcaatcaaggtcttgataccaggaacaacaccttctaaaccttccaaaccgaatctcttatcgttagggaatttagtagataagaaagtttcaaaagaagtagcccaagtcagtctatccaaaatttgtctcttttggtctacggtataattataaggttgtgggatttcaattctttctcttaaccattcacattgttcttttgaagggatatgaatgtattcgataccgtatccagaacagtacaatttttccaaagcagcaataatttctcttagtttcatggtctttctaccatcacgagagaaacgtggcaagataccgggtcccaatgtgatatctctatctagatccttttctgtgaatccatagtgttccaaagtcaactcacgaggtagaggtttactcttatcatcaccaaatgaaatttgtaacggatcaatatgagccttctggtgacctcttacttggtaagcacggcacaaaagttgcacttttaaatgtgttgtgatgtcttggtcaacgccacttaacgaaccccctatcaatatatcttgaggcacaccaggacccgttggtattggaattaatgttggtggggcggtgaaggcagaagaggctggaatattcagattacccatgttcttgaaataagcatcccaagagacatgaactgaagtgggatccttttgccaagcttcgtacatctcatcgatatatgatgcattggtggtggacaggaagttgtccgtcgaagatgcaccactagccaatccacgactgaaaacagccaaggaagtcggtttgcttacagcaccgatcctggtgaatttagaagcatgtaacaaacgctgagatgaccttatagttctcaacattgttcaaaagacagttattttttgttcttttctgtataacgaaagaagcaaaacacaaaccttaaatcaatagatggtcgctttgttctgtacgtgtgttgtaaaattgatatatccagttatcaagtaaaaaaatcccttgcaattcacaaaatgttgaacttttcaacgatgattaactttcaatgaatctttctcgtttatatcttcttttgtttttatttttttatggctcttctttgtgaattttcaatccaaaattactcacaaaaaaagggaacaaaagaagaagtacttgatagtagtagagtcagaaactaagacgacaacaggcaaaaacttcgattcaaaattgactgtttttgttaacgttcctaattaattgaaaaaaagagatatcctacttgcgaacacgaagttgaaataaagcttcttcaatcttttttttcttgtcggaagatcttgaaaaaatacccccgatttttttaatttcccgttctctttcacttaaataagcagtgaaattaatgtataaatcctgtatcttttatactttttagccgataaaaaacagaaataccaacaaaaaaactaaattagagtaagcagaactcaaacagtgccagagagtcgagtattgcgtttactagacgagtttaatttaacaggcaaataataaactccgttattattttccttctgtctcctatcttaattgtattaaggcaggcctcttgaatcttgaaaataataaatacctcttctataaaaatagtaagaaccagtatttatataggaaatagtagatgcactatatatattcacgattttgtgtgaaaaaaaagcactcattcaactattaaatggaccaccaatatctctctcgtgccatttccccggttttgatcctcactcccattttctttctttcttcgaatcggtactgatacctttaatgcctgtagctctctagcagctttatgtggtttttgcataaggtttccttgctacatggtggaacaaacaagtgttttagtgccgcttactcagttttcaacaatacgagaatgccagatagtaaaagctgtagggcatggtctgcgagtaggggtccggtgacccgttttcggattcgaagacgggaaactaccagattcattttgtgggacagcccggaattccgggtaacgtttcaacattttcttttcagtattccatattcagataagtactatgcaactccgtgccagactggctgatgggttttaaagtgtaagcaaaggctgagtgcggttgacggtatgtggtgtacggacattcgtcaacccaactcggtcgcgagaaattctttgctgtcacttgaccattgcttgattatcacttggttcaagatgtttcaatcaatcttcgttcgatacttccaatactactactctcaaggttaagctacactagactacaggtttttgaggctcaactcatcttcggaaattttatagttgaaaactccaggcaattgttatgattaagaaggaaaagaatcagtgatttaacatcaaaaagaattgaggaaacgtaaagtggctctatattgaatcgagctctagcaacgtttccccctatcgtattcttccgatacttgattatcggaagatggcaaagagaaagacaaagtacataatctgaatctatctacttatatagaacatccacctctgaggggagaacgtcttcctcgctagtgtacagtaacgtgtcaaaagtatccgaaattttggttcgcttattcttcttcttcgatcagacccttttcagagacatagataccatccaagaatttacgaatatccttgtttctaacacgacagatttgttggatgtcagcagcgttttgggaaacgttttcaacagagttaccagacaagacgatttcgtccttttggttggtagagaagtcaacagaaacaccttctctgactggaacttctctgaccttcttgtcacccaagaagtttctgatttcgatgaacttagcaccgtccttttcaatgacgttaacgttgattgggaaatgcgcgtaaacgtatctcaacttgtacttgtaacccttggtgacaccagtgatcaagttagaaatcaaagacttaacagttctcaaagcagcaacgtgctttctgtcaccgttgtggacggtgatcttaatttgtctgttagagaccttggtgaaggtaacatcgatgtgcttcaagttcttagtcaagacacctcttggtccagtaaccttgattattctggatctgatttgaacggtaacaccttctgggacatctaggacttggtcagtttgaatgtacttcatttttggttatgtgtcgtttgctttggttggttgagcaaagttatacagtagaattgaacagtaccgtactactgctgtgaaagttgtaagttgaaaaatatggctttccgtattctgattatatatcaccagagtctggacagctttttttcatttgaaaattttttcaaaagggaaatttaatttgcgtcgtaattcaaaacagaagtaaagaaaacagtcccaatatgttgtgtgagacgtgtgggtgttatgaaggtgcatatatttggtgttttacgatattatgtatttgcatgtcgtcagttattgattcaaatactttgagctatatacatatcgtctttaagtactctgtatatatcgtcaggtttttcaaaagaatttattaaaggtaatacgtggaattcactacattttataagcagtctgtttctttcccctattatgtgttcgtttttaacgtaattttacaatcttgccagtagcgtttttgggggttcattactcattcttcgagaaccagtcaatcgcaaattcttccaaggcttctgcgtcattgaagacccaggaaccctcttcattgtaaagcttagcgttattgaacatggtctccaagtccgactttacttcgttgatagattggtattgtttcttgttcaacttctttgttatcgtctctaatgctactggcttctcaataaccttgtagtagtccggatactccttccttgaaggtaatctttcgaaaatgaaagttcttgaatgctcatccgttggatcagttaactctcttagtaaagccaatagtgcctcgactttatcttttaaaggtggttcttctttgcgtttggtgggagcgtcatcttttttcatgttaagcttgagtttgatcttcttttttaaaggtcctgcatcttgttttaccggtttcgcttctttctcttcacccaattccgactcctcttcaggagtagtcgaaggagtagcgacaacctttctcctagaacgagttctaccattttcacgagcaggagttacggcttgctcagcagatattacagtattggatgttgaggaagattcttcaggctcaacgctattttctagactttccaatcctaattgttttctttgacgtttttcacgagcagctctttgacgttcaatggtttcatctaagtcctcatcattatcgacagcttgtaaccattgttcctctgttaaaccatcatcgtaatagactctctttctttctctgattctgccaatagcagcaggctcaacattcaaatggtcagtgatatcttcagtgaatactgaaggtaactcttccttggtgatcaacctcggcagtggctttctcaaacctaaatcgatggcttctctcttctcattagctacacgttcttcatcaatctttttgaacagcactttctcgtcttcagtacgtgcgagaatttcatttaattcttcgtcgtctaattcaccagaatattcatcgtctttgttagtatcaccttccaataatctacgcaaaaattcttcttgttcttcagcagtagatttattgtcaaatttaccggcttgaataactttaccatcaatatccaatttttgcattgctctctctagaataacttcttcgacggaatcggttgttattaatctcaaaatacgaacttcgttcttctgcccaattctgtgagctctatcttgggcttgtaaatcctgatgaggattccaatcagtatcgaaaataatgaccgtatcagcagtctgcaaatttagacctaacccaccagctctggtagaaagtaaaaagcagaagtactcagaatcgggtgcattaaacagttttaacattccagttctatcctctgctttggtaccaccatccaatctcatatatttaaggtctcgcatccttaagaaatcttccatgatatccataacttgagtcatctggaaaaacatcaatactctatgacctgacgctttaaattttggaagaactcggtctagaagttcaaatttaccactaacacgatacaaaatggagctgttctctctcgttgggttgataacattttcaacctcatcgaaaacgaatggatgattacatatcttccttaactgcatgaccttgttgttcaaacctttgataccagccttggttgcaccttctgttcctgcaccaataaagaaagcattatgttttaacatttgttcgtatagttgctgctggagacttgatagcttacatttcacaaccttctcaactttgtcaggtaaatctttttcgacttccttcttcaaacgacgtaacaaaaatggacgtaaaactttgtgcaatcttctaataactagaagcgtttcttcttctgtcatttctagcttttcttgagtacctgtgttcgcgaatggtgtattaaaccattcgtcaaatgtttttgaggaattaaagatcttaggtaaaacaaaatttaatagagcccacaattctggtagattattttgcaatggagtacccgttaaaattagcctattttttgttttgtagtaatgtgtcaacgtgtaagatagttttgattgagcgtttttcattctatgaccttcatcgataatcatatgagcccaatcgtgtttggccaacagtggacgatcctttataatgtactcataagtagttagaaccacgtcgaaatttcccattttgattgtatgttgcaaagccttacgttggtttgggttccctttgtacacaatggttcttagagaaggtgcccatttttcgaattctatagtccagttcgtgatggtggataaagggacaatcaccaaaaatggttgcctctcgttctttatttcataaagataactgatcaacgagatggattgaattgttttacctagacccatttcatctgcgagaataccgttaagatgattattgtatagagacaccatccactctaaaccctttagttgatactctttcaacgtgcctccaaccaatatgcttggctgtttgtctactgtttccttaattctgtgggaaacctcgtaataatcaattttttctctttcttcatccgtgattggaggaatttcttcaccccttttgatgcgtacctcattttgctgcactctaaccgcttgagcaagagaatccaagaaagaattagtttgtttcaatagatgtgtaattcttgtatctttggtttggtctaacaatttcaaatatgcttcttcatcattggacttcaaggctgctaaacgttgcttggcagttctttccattcttctctgctcatctttctccaaatgaccatgcaagtttccgatagatctacccatttgataacagcgatcacgttgtgttgtatcattctccaatctttcgttgatacttgatacaatattattgatcctttgtaaccgtaagtttctttctcttctcctgctttctaccaattcctgcctttcaagttcttctgctaatctagcagtttgtggaacgatggtcttcggtctaacatgaatggatctttgagctgctaaagtataaggagagtcacggagagatggaatgatattatgcgatttagctgcaacactttcaatcagcctctttctcaaagatttctgtttcgttagcattttcaaggacttgagctccaccaaagctcttaacttgaagtcgtctgcgccggtaggaatatcatctttagttacaaaatcaagcgcatcatttaaagaatatgttcccaaattagagggtagattttcaagttgtttaattcttttcgcaatgagtgtggagattattttttcaacctcccaatctccaagcgaggcttcatttccagatttaagacgaaagttgcttaaagcttcgggaaggcctaagcgcacacttgtttcgtcgaaatcaacagaaagtttaaccttctccagttgtaccgagatatcagaactgtcggaacttactgattcatcatcatcatcctctaagaggccatccggtatatttatatctttactcaaaagctgtaagcttaccatttgctccttcaacaacttttcgtcccactgaatatctttggctgcgttttctcttaacctcagcagcctttccttgtactcttcctgtttatccgagatttgggtgaaaatttgttcaatagcctcaacttcaagcttattatgatctctatattgagaaatgtatctgtaacgataaatcaaattttctaattgttctttcgtttcaggtagtggcaagattactctttccaccttcttcatttcttctagaacagcggcaatctggttctgtccaatagcactaccactgtcgttccgaaaattgttgttgcttcctttgtcagcaccaacatggttgtcttcgatattgccgttaacgtcctggttttcagtttcggaattcccattatcaacattctcagaattcactataggaagcggataaggaggcgctgtatccgcgttattcgttacgacgacttgatccattgttgttttatttcacacttcttaacgtgatccaggtctcttcccgctagtgagctttaaaccttttttattctgaaagggggtaaaacaataactgaagtcctgctaaaaaaattcagagttgtcacaaagctaacgcgatacaaacaggtactattgccctagaattctttactgtttcgctttcggtgcgtctatttttttagccgccgttgccgtgttgaaaacaaacctctgttcgtccttttctcgtgtcaaaactaaattcagaataaaatcaaactgttttcaaattcatcctctttttcacaattttatttatcgtgtttacttttttctttgacattcactattgccatgggccaaagtacgggtaacaacaacaagaaccgggtaataaaccaacttcgatcacgtgccaaaatattcgcattaaagtgggcaccattgtttcttttcttgtttaatatttcatgacctaaaatgaaaatttggataatacgccatggatgagatgagatgagattagatgagatgtgatgagagtgaactatcaagttccccgattgagatagttacagtgcttcgaactgttacaaaagtgtcttctgtattgacaatcaaggtttgaagaactaaaattctctgattataatgtcatctcttgcagctgctcatgctaccaacgctgtgaacgcattgttgcaaagcgtactgccgggttctgcgtcggttaatgcagaaagaaagaaaacaagccgagacaaaggctcgaaagcacaactaatagataggaacttgaagaaaagagtagaggtacaagaaaaggatgtataccggatcaaaaagagggagaagaaaatgttgagaaagaagatatctggaagaaaagaagtccaagaggatatagaacagaaggctaagctacaagtactaagaaagcatcaagtagataattctcttacggatcatgagaaatcctatttggataaagtggtgaagaaaaatgttcgcaacctgaaaagttgggattatgacgataaggaagaactgttagatttacagaaacaaatacttgccaactcagaagattcaaagaaggtaaggaaggtaaaatctaggagacaaaagaagaaacagttcaaggagaagctaccacaatcgatacaagaccacagatataaagctctcacacctggattggctccagttggtgcgagcgatgaggaggaatcagaagacgaagatgaagattattgagctcatatttacaaagacgtacaggtacggagttttcattgcggctcatacaaaggtgtgtttttttctctcagcatatgatcaaatactcagtagactcaagtgttcattgtcggttcatatatattaattaagtatattcattatttgaaggaagtagaactactcaaatggtacctgtcctaattccaaatatgcctgttttgtgtctatgcattgtttgcgcactctacgcttcgagtcatctaaaccaatttgaagttttgatataatttcattcttcatggggatcaagtagttaaggggaacactggttgttaaagtctgaagaatttctaatgacagaaatcttacgttcacgttactatatttcgatgggaccaataagttaagtaacagcggaactaacgaatggacatgttcagtaaccaactgagacatttgattcacagtattttttagtgtctctagagatgatattctgacttcgatattctctagttcaagagcctgaagaagaagaggtaacaagtccgtgatatacgatatggtgatatttgatggagtattctttaaaactaaagaaactgcggtaagataattcgatttaatggtcatattatcagaagatttgaaggcgtttaccattttttgtgcaatgtgattgaaaaacttctgcttgtaaattaatcgaatattgttattccatgacacctttttaaatctttgaaaaattagaaggtcaagaactaaaacttcaaagaggtgagcaaccttattgccaaacttctcgtcacttaaaagagaaaatagatgatccgtcaattttgttgcaagaactgaatttttcatgaccaaacctttgttaatccagcatattatttcaagattcttaatagatgtgtcagttaggtccagcacgctttctatgtaagattctgtaacccatttatttgataatagcgccaagaactccaagtaatttagagattcgaaagttgggagagcttcattattcttaatgagttcaatggcttttgaaaatatatcattcgcggcttcaaaagatgtattcttatccaaagctgccaaaagcctggagtaaatcacaatagatctttgagcagaatcaaaaattctttcttcatccaagaaacatttattataggtaataagttcactttgatgggttgagacatcagattttatgttaagctgaaataaaactccagccgcaaggctcaaggagtggtcatcaaggtatatcatatcatttttcaaagagttttgtaaaaatgtctcttccatcgattccttcaagaattgcacaacgttctggtcgaattcatcaatgttattctgcaaaagggaaaaaagacatgacaaaatcaaaaaacaataatcgctgcaatttggatgcattacaatgaggtttaatttcgaagcaagaccaacaatactttctttgaccaaatggtgccttgaagtagtgaaatcgagaatgaccttcaaaactcgctctattgggactatatcagtgttattcaatgtgattggaaccatgttttcattatcaggaagtagatgtaacatgtacttcaaagagacttcataaataatggattcattgaacacactgataaacttgagaccctccaagcatgcgcagtatatattcttattctcgtcagtcaaaattgtttcggtgaaatattggacaatcatcgctatttcctcgctatccaaaaaacctgacattttaactagtgtggtgaattgtatgatagcaagcgtcctcagggtaacttcatttttggatgtaccagttaatgccttgctgaaaaccattaatatgctgtctttgtgattttgtaattcattcttagcatggaatttggaaatctctttaccggtctcgccaaagagtgaaatataagcgctaaaaaatggcgccaaattgagaatcaagagtttctgtttagaagcatctaagtctttatccatgaaaagcactggaatcacttttttcatgactttattaaatgtttgcaagctcactttagaaattgaagcgagcaggtcacaacactgttttaaatccttatcttgttcaaaatttggaacaaactcatcaaatatatgattaaaaaatttatcaaatgcatgttcatctagtgcgatgagtttcgaagataatgaagttataatagagagcgaatccgagtagttactaatatttccttctggtctcgagttttggttttctgtatccattgcagtatcgaggattgaaggttccgggtctgtgccatttaaaatttcaaactttagggcatcccaaattggcagccagtgtttcaaagatgatgttccactgaatgtatccacacatgctttgagggtcagtatagtatcatttttaacagttggtgacgatgctgccaatttatctaagaggttcccaaaagcatcctcctcaaacttttccgtggcagtgatggcacttctcaaggctagtttcaaatcattattggtaattttgtatggatcattacttgggggtttgaacatgattgggaagtagcagaataatatatcaaataattcctccttgaaactgtcaatgttgcgtaaaccggtgctaatatcagaattcaaacggaaagatatgagaagatttctaggatctttctcaccagttgcaacaagaataaaagtttcgatatataagtcattcaatttgagattgcccaacatctgggatttgaatttgataagtatattatccataatcctgaatccgaaatatctagtcgcagccaaaaagttagtaggttgatagtcatttcctaaaagttttaacagcttttcgacgtgactaacgtaaaaacagtccattagtactaatgagttgatcccttgtagtgtttctttcatgcagcctgaatcttccatcttactttggtagaaatcgaatatcactgaaacatcattcttctttagtaccgctggtgaaatgtgttccaatatacaagataaacagctcaatgcattttgtctggtgctatcgtcatcagaggttaagtactctcgtaaaaatattacaattcgtaacaattcaatgctctttcgagttacctcatcagcgatcgtattggccaatttgtctgccacagaagtattaacctttgcattagccataaaactgacaatgtctgctttcaatttatcttctgtatagtctgtcgccattatggtacgatataaatattttacagtgatagggcggtcttcaatgacaagtttatcgaatgctaaagcactaaataactcgttgagttcttactcgttcttgttgactaaggttgggttttattccacattacgattttgatatgtgcaatgcttccgattaggcttaattatttgattacccggaacactccgtatcatgtgaccagatcaagaataacaattcagtgaagttaacagtaggagatgacgatgaaatgatctgcataagggagtggaagaaagaattgctgtctacgcggtaagagatcgttattcataattgatcgtgttcccaaggtttatggaatacgagaatttgggttgaattgtgcttttatcaaaaggcctattgtcacgaaaattcgctttccaattgttttaaatcataataagaaaggtccaatactgccagatatccacaacttacaattggacatgaactctgggtttatgtttcctccagtggggaaagaaaacagggcacatggtaccttactttctgatgatatgggtaatgattttaagtttccaagtgagaatgtgaaccaagtagaggttgaaaagcaacaacagtatccttccacccagattgaccagggggctgtgcaacatagcaatacagattatcctcaacagacactgaatatcatagacattccaccggtagatcctaatggtgtgaccccagaacaattccatatcaatgcattgcaattgaacaagccgggagataacctgtcgaacaaaattacaaacaatataaattacagcatcaacgaggtatctcagcaaccaagacctgatcctgcatctgctaatagtacatcctcattccccgatgaatacgttgccggattaagacagaaatcggcaactgactggaaaagtccgtctgaatacgcattacacattcttttcacaaagttcgtaagatttgccgagatgaagcttaatatatgtttacaatatccgagagagacggaacctccaattatagaaattttaggagaaggcaaggatatagaatttgacaaaattatagaatcgttgggtttcatttccaagaaaaatgcgaaaccggtaatagatgcaatgatgttttggaggaagacaaagtctgaagtagctgctttagcagcggaaaaactggataaaatcatgcaagaatatgagcagtatgtgaagaataatgagcaagttctggcagctagtcgaactcactcaaaatcatctagctcagctagcagcaggttgacacatagaagaaatacctcatcaaagtcctctacaagcctgaattctcattcagatcccaaatttgcatcattagagaaccaggtagagagaacaaaagaaatggctttccaggccgatagaaaatctcttattaccatttatattttgtgtcgtgttttgatcgagattgtcaagcagaatcctatggactttgatgatgagttaagtacgaagcttgaaggtatcgttttcacacaattgaagactaccgatccatcatcactgtcttcaacgctaattaaatcagcaaattggaactcgttcgcggaattattaggctggatgagtgaaaaaaagtttatctctgtcagtgataaatttatagcagatctcgaaaaaatccctcccaaagttccccgtgatcaagagccctctgtgcaccttttaatcctaggaatgcgttatttgaggcttaaaaactatcctctagaaatgtttgaggaaagtgcagggttcatcaaatctatttcgaagttctttgctccgtcccaaaacacttctattcgtttggcttatgctgaagtactaagtcaacttttattgccgttggctggagcaatgacagcagaggctaatcatccaacgtggatagaagcaatgacgtcgatcctagctacctgtaaaaaacttcaaactgacagcaaatgctggacacttgctttcaagttgaccgtggcagtgttgtgtgtctcagatactgaattgttttccaaaaactggttatctttgatcgagaagaacgttaccaaaattaaatctaagtcattagaagatcgtgttgctttctccatgggcctttcaaggttgatatgggtctatcttttcagatgtactgaaaccttaaacaatacagacaaaacgttgacaaaattgttctcgttatttttgagttcaaagaagaaggagaactggatcacgacagatatggatatcataaaccctctatgtgatgttttcgtgactgtgggatacgttcatcctaccttcgtatttgaaaatgttcttctacatttgatgaaatcctcctttaatgggacgaatttagagaatattgcacatgaaaaattgatactagtcatcaatacttatagaggattacttatgactaaagaaaggcctatattccctgatggagaacgcaggttctatgaagttgacttgaataagatatcggtacattcttcggataaaaattgggccaatcatgaggaacttgtgaagtatttgtacaaacttttcatgttacttgattctaatataggatcagaggtgtggtcaccggaaaatgaacaccgtcgccaaccttccacacctttctcaaatatcacaaattttggtttcggaatcaataatgataacagtgcaaattatgcacgaagcctgaatatggcactttttgcaacccttattgaggttttgccctgctgtttgtcagtgtctcaaagcattccattcaaatctacgattgaaattctatccaggaatgctgtccacgcagatcagctgattgcgacaagtgcccaaaatgcattgaaagtattagctgccaaaaagaatccctacaccctaataacttggttcgctaaatactcatttgatttcgatgaaaagacacaatcaaggtatagcttgtattatctttcttccgcagaatacagaacattgcttgcactatacgtcgaattgcttgaatgctggctcgaagattttactaagaacgacatccaacaatcagaatcagatgccgctctcaatggaatgaaactgccccccaaaactttggaagcgaattatcatgaattagagaaaattgaatggaaaaatacccaaactgtcgtggaagatgtcgaaggcaacggtttattctttctctgcagcgccgatgcttctatccgccgattagcaattcaaattcttcaattgacttccaaattcgataaagcgttgatgcaaaaggcaacaacatatgataaaggtcactcaagatcttcttctcgtttggtagcggaaagtggatcaagattgatcgatatgctcccatcttatgatattccaaaactgctagaacctgagaagcaatcgcttagtgtggccgaaaagtctagacttgtcaagttaaccatgaaatctaagacgaacatcttagtcagactttgtgaatctgaatatggggtcgatgcggctctttggcaaagagtatttccaaaactcttaacgtacatatttgaacaatcaccagtaactatggcattatgcaggtccatcgtctgcattcgtttagtgcaactttatgaactaattttatcaataatgagcaactccactgagaagttcaaggatatactgcccgaagctgtagtaaatcaatggaagctttatctaattgtggcttgcagctctcttacttcaacgaatgaccaaaaactacacattccagcggctactggacagcatggccgtaagaaaagtcagcaaattttcaccgttcagcatcaaaaaatcaaatctgctacttctgttttcaaaatggtcttgcctctattaaactgcaacaaaaactttattaaatctgcagtaatcactggtttgagtgcaatgaatatcaacatataccgcgcatacattgaaagtatagatcaatttatgacaagctggaacataaacagctccaacaatgttatgagaatggaaatggtccatattctagtaatattatctccatttttacaagatccactgattaactcagatgactggattttacagaaattgtctcattatctgaaggaaatgaaaagtttccttgagatagatgaagttcaaaaatcttttgagtttcaacctttgcgtcattacttttctggtttcctttccagtttctacttctcgattagaacgaaagttgattgtgataccttctttccattcgaggcgagggcatcttgcttcaatttcttaaaagaatggtgtggatacggccagtatacttcgctatcttctcaacgatatcgatacatggctgcaaattcccaaaaggcatacgaagatgcaacctttgcaacggctttagagtttcaaaaaagcaagctagagaccgttgcacttgaatgcatgatcgtgttgtgctcaggagaggtttctaaaaccatatatgacaccaacggtctcccaatacagatgtcatttgatattgctggtttactttgctggattgattcactcttgcacgctccgaatgacaaaataaaaatactcggagtcagagctttgaagacaattcttgaagctaacacttccaacgttcaacttatgagggatgttctgcatcaaataaagttacaaacatcagataatttgattcatcatgcgtattattcgcttttctgtgaagccatttgcagacaggatacgctacttttaactgaggatgaactggttgcatttggtttgaatggtgttgtaagcaacgataaagcaatgagagagcacgcaatcgatttattaatattcattgaaagtaaactttatgaatcctcatatgcaagaatattcaaagagcggttatcaaatcagtcgaaaactgtatacaaatctaccgctcaagagatatcaaatattttcgccgaattgttgccgcaggaagtgagattgaaagtattttctagaatgtcagagtacttccacttactgcctactgaattaaaacagaatgttctcgttatgtttgtcccgtgggtcaacaagtttaccttaaagtcatccgaggacttggacactttcatggtattaaataatacctttgctttgacaatctattcaaagaacagatatccaatggaagtagaacaattgtggatttcgttaggtaaaggaaactcattccaaaacattcacgttgttttagaatatattatatctacatctatcaactgcaggaacccagagtttgtgaagcatgctagagagattgtgctatttttggctaatgttccgggtggaatgggcgtcatagatacgttattccatagtctagagccgaaacatataatcccaacatcgaaaatacttcgcgaagagccacaaaataatgataaatattccttcattgcagatatctggacaatcttggattatcgtggtaaagatgttgttttctctaaggctcaactatcaatgattttcttggtcaacttattgataattccgaatgaatcagtaaaatctcgtctaccgttattgctccatatatccgtttgtctacttgatcatcacgtacctatcatccaagatagcgcgagtcgtatcttatgtggtattatttatggcctggaacctaccaacaaaaattccgatgaaaccgtcaaccttatcaaaaatcgtcaaatgctctggacgtatgagaacttgacaaaggaatctggtgccagatctcccaaaagcatggacacaatgatacgtaatatcattagcatattttcagaaattgagaccttacaggaggactggcagcgaatctcactcaaatgggccaccacttgttctgttcgtcatattgcctgtcgatcttttcaaatttttaggtccctcttgacattcttagaccaggaaatgctacgagacatgttgcacagattatccaacactatttccgacgagaatccagatatccaagggtttgcaatgcaaattttgatgacattaaatgcaattacagcagaattgaatgctgataagttaattgatttcccgcagctattttggtcggtcgttgcttgccttaatactatacatgaacaagaatttatagaagttttatcttccctttcgaagtttgtttctaagatcgatttagattcaccagacacagttcaatgcttgatttcaacgttcccatcaaattgggagggaaaatttgatggacttcagcagatagttatgatcggattgcgatcatgcaactcatgggagatttcgttgcaatttttagatagattaaatttgctcaacgatagtcaaataatagcgaataaggaatcacgtattttgtacgccttacttgcaaatctgccacggttcctatacgcccttgatacgaatgatatgaacgatggtgttgtacgcggtgctaactgcttgatttctttatgtatggcaaatgatgagccatcgctatcaagaattatagactcaatggtgaagaacaaattcagatcgaagaaggatttcatgagccaaattgttaactttattagttcgaactttttcccaaattatgcccctcaagctttggtattcttattgggtcttcttttcaacagcatggactgggttaagatacaaactatgcaactactaaaacatatctttccattgacggaattatccagaccggagtttataggcgtcggggccgacttcatttcaccattgctaaggctattacttggtgaattggaatccgacgcgttagaggtactcaataccatccctaaggtatcggggagcaagatggataaagatgttctcagaataagtatgggaaataaggacgcgaagaaggtatataacaagacagcgaccttatttggaatccccgaagagagcggctggtctattcccatgcctgcgttgacggcggcatcgactcggcataatgtgcacgctgtatttacaacttgcgcggtaatggtcggtggggaagttgataatggcgattcaggtattctagaagagattgtcgaattccatgctgatggtggttatgtacaaggaacagatgaattcggtgacgtggtatctgtcacagaagacaaagacccttcgttaagccatatgtgggccgaattagacgatcttggctctttcttcaataaatcggattttatggaggaagaacaggaagaagatgatgtctgattaagttttcataatcaagacttggaaacatctaacaggtgtataactaattaaataagacttatattatttaagtttggagatagtaatcgcactaaagctatcgattagaaagcaagccaagtgagactatatagtgtctgttttggtatcatctaatggttcctcctttgtctttgaatcattggcagttacaccagacatatacggtggtaagtatcttccgaataattgcacgtccaattggtcaaacatacctggaacatacgtaccgtcgactgcggagtcaggaatctgattaggagtagttgtcgatatgtattggggtgtctgttgaagagactgtttgttttgatttgaatcaacgggcagatacctatccatattgttttcaacggggtccaatgatgcaccaaagtttgtgcttgagaacaaatttgctgtttgagaagtattcaaggtattcactcctgaaatactagtatttggttcaactgggaacgtgttcgtaaggaaatttggtgttggaatttgtctttcaagagtatctactgatctatctggagatataactgcattttcgttggagtcatcaatgggaagatcaaagaatgtaccgccgaaatctgaagagtcttcgaatttcgtggtagccgcttgttgttcctgttggactttcttttgcatttcaacggattgtttggttttagcattgaaagagttaaataatgcagtcaagagattataagtacgactagctgccatactagtctctttaagctgaagaagaacctgttttccatttcttacatcattcataatttcatcatacgtggcaatatcttgcgaattagtaggagttaattctcttacgtaataaatcaaagcagcgacagagaagaagatcgtataaatactgaaccaataagatccaggcaagattttcgcatccatcatttctttggccaatttaacgaccgttctggccactgagatgcaattttttgctctttgtatggacaaagtatcagtctgaggagccgatggtgaaaggtaatggataaagggacggtatagaataatttggacttgcaaaaatgatagatgtaaaagacagttagctctcaaatacctttctgggacatccttcaaacctggaattagttctggaggaagttgatcgagccattgccttagcttcaattccaaatttgtcaccatttgatgagatatgaggttgttggtcttcttaatgggatataaatcagccatgatttggtcaagaatcattaaaattttggtatgttggtttgctattcctgctgaagacaaaacatcgccttgttcttcagggtagatagcgtcctcagtgatataatcgtcgttcaattccagtggtaactcttgatcgaagtctcttggggatatagtcctaggtagacctaacattgtgttaatgtaaatatccattttgtaaatggtgtagaacaatctcttcctcatttcaatctcaatgaaattcgtttttgtttttgacggatccggttttatttttctatgaagaccttctcttaaagcacttctcatggcaacaccaatataagagtagctcgtggatagtctggcagagcattgcaagaaaaggaataaaagaacaatggtttgaattgaattcaagtctctggcatttgtgatgtcaatcaactttcttgctgcaataaaatatttgtacccttcatcttgcaagaactttgtagaagcatcactactattattattattattattggtgttattattggtattattattggtattattattagtattggaatcaggagtattagtatcagtgttaatatcagcattagtattattattagtattactatcatcatcatcattaatgttattaggggattgttgattgacattcaatctgtttacagttttggtaaagagggtaccaactgccattactgcatagcacaagggcaaaaactgcatttgctcatgggtgtaattctgaggatccgtttcatagagtaaatctaactgtttgataaatgatggtctatggtaaaatctgaacaaaacacagcagttttcccaagtagattttataaattgaatggcaatgggtttcggtggtaaaataatcttaatttctttaccctcatgggattctatcgacccatccacgttttctatcggttgtaaattttgctgtagatgtgaaccaatggaaatagatcccgtacctgaaaatgaatctgacatgtctctatctctcgttacaataggtgcaacctcagtaggtgcaatcaaattgtattcttgaaccatttcattgaggttgatatccttcgtggtattatggaacagctgtgcgaaagtcgggatatcaattgaatcgatatctggtatatccgggatcaactctcgaagaagttcctcatattttgaaaccctgatctggagctgtttattcttgctggccgaatatttcttgtgatgtccctgtgttgaagcagcactactattagacacaccaccgtggttactgaaaccagaacctagccgttttgaatgtgacagagtgccagaatccgatctgtttccaccagtaaacccatctgatgactgtccgatgacacctgatttcttaccagatacagtaacagtcccagcgatagaagaaccaactgaattcgatgaattagacccagtaaccgttcttctggtcggctgattgtaagtacactcgtagttgtaaacggtacagtgaatacaaggctgtttcccatcgcatttgaccttctttttacgacattcgtcgcatgctctagtgactctgcgtcttttattttgaagttccatggcgttgtatatcgacgtctctaaatctatctcacaagtaagaaccagccctattcgtaaccactataattatgcaagtttcctataccctgttataatttcggctggtcaatgtggttttgagattcagtgaaatttcggcacttgctggatactgaaatcgttgaagagtattcacaaaaccttgccttaagtatcaaaatgcctacacctgacaatagattttaattcacgccaagatctcacgttaacatagcgacaagcatatatatatatatatatatatatatacatattctatgtaagttaaacccatatctttaatatatagcgcattttctgttttaaggcgatgcccaatatctcgtgtgctgatattcactgattctcgattgaagaaatttaaaaaaaaaaacaactggaaaccgcatgaattatgtaaacaagaacagcatggaaagaacctccggattcatctccgaaccgtttcgctctctcactaagccttgatagcaaaataaatgtccgatacacattgcagtagcaacaaacggagcaagtcagggaattagactgggcacgtgatacgtattgtgtatcatcattaaatgcctatctaaaataaattactctatcccaaagcgtcgtcgtacatatagtgtcgttaaggacttgtcttctatccgagggaaaaaaagggaacaggaactttcttcggagaaggtagcttccacaattacagttgtagtatcatgtgacgtacttacccggatatacacatcttttgcatctcagatcaaatgtgcagcttttcccctttttcgtgcaacaaattccgtccctcacatcgtacacgatgatcctgaaactacgtcctctagataagtactgtcttatctaagagtatcccataccattctttagtttttcgttttttttttttttattttttttattttgttttgttttgttgtcaatgctttgtttaccaaacaaaattttgaatttttcacatacaataaaattgaatcaacattggattaactctataacaataacaaacaatatctagctttttgaatcagtggttatggaatttcaaggattcagcggttaaagtcagtaaaatcgttgtatattcaagatcaggctatcaaaagatatttgtacagctcggctgttttgatttgagcgtgtgcggttttctttatttttctttttatcagtaaagtaagccttactaatttttattgtctgtttattctggttcaaatcccagcctttgtttggatcctttgtgtttttttccttttagttcatcatgatgtctcagtcgcacgttcagatacaacaaggtaacggcggaagtggcgctggcggtttttactatcgaggcgattctaatgcggttatgaataatgttgtgaatacaggcacgggtattaatgctagtgccggggcaggtggtgtttctttgcaacaacagcaggatttcgttaatgcgcttataagtgtgttggaagtgcccaaggatgccacttctgttgcagctgagtatgctaatgataagaatactgccagtgaagtgcaagcttatgcgaaaatcgcgggcaaagactggacttactatttgaaagatatagtgattaacattgggaggaacacttctccaggcgatgcttcggtggatatagatttaggtccggcaaaagttgtgtcaaggcagcatgctaccattaaattcaattcaaattctgcactatgggaattacatgtcacgggacgtaatggagccaaggtcaatttccatagaattaattcaggccctaattcagtgcctcatccgttatcctcaggatccattttggatatcggtggtacgcaaatgatgtttattctaccagatcaaggactttacattgatccgaatgcggtagcccatttgactccaaagcttttcatggcttattataacgttactacaaatccattgttacgaaaccttttccaatctaatccagatttaattcattcgttggaattatcttcaccctcccgtaatggtcaattaggtgtcagctctcagactcaaatgttgcctcaatcaagccaatctcatttgcatagccatggcaacggtcagccttcagtgagagctttcaaaatgtacgatgctcctgattctgccatgaggtcacaactgctgtcagaatctacgggacagatgtatggttccaacggtgcttctaatggacacggaatgtcacacagtaatggttcctccgacatgtcgaacggtcaactgtatggtaccatcgctaacactggattcaacattgctagcacagatgtctctactgatttatctcgtgatgaaaacagaaatattaaaccacctcatagttatgctaccatgattacacaagctatcttatctacggaggaaggtgaattgtccttatctgacatttacaaacatatcgccaaccattactcttactaccgttatacaaaagctggctggcaaaattcaataagacacaatctttccttgaacaaagcgttcgaaaaggtgccaaggaaaccaggtgaaccaggtaaaggtatgaagtggagaatcagcgaagaaactcagagagatttcctagagaagtggcaaaacgggaaaatagggaaagtgaggcgtggatctagtgtcactagacagttgcaagctcacatgtatcgtttcaacagtctacccatacaaagagagaccttcagcttcaacgatcaaagtaagaccaatgtaaaaccacaatcatcatcatcgtcacattcggattatagtcaaactccgaagctagaaaaatccttgcaatctctacaacctcattcacaatcatcgctacatcaaacttctccacctgtaccacatccaccaattccttcatattcgcaacaggatcatacgtcttcgaactattctacggatcattcacatcagtccgaccttccggctcctaaaagacaacatttgaatccaccttctcaacatagtcaacatcaacaaccagctcttcctccaccttcttctgggcagacaagatcacccaatcaccagcagatgccttccaatgtatcttctaccggatcattgctacattcacctaacaaacatttccaagtgaacgctgttgaagcgtacactccggaaagaggatccaacttacagaaatctccacaaccaatacttaatctaccatcccttccgcaggccactgacatgggacaatcgacatcaaggtctgactcaaacgctttgcagcttccaacaaaatcaagccctggagtaatgaatttattacaattttcttctgtaaataatacaccctctaccaatttgcaacgtactccggtatcccacccacaagtaacggaaaatctggatgggaaagattccaaatctaatatgttggccgtgaataatgcatttcaagagtcgaactccatcaatgaggatgacaagaccaatcttctaagtgccaggaacgtgcaagatgaaaacgatgaagatgaaggcagaataatgagcagtccaatcaaggttaaagataacagaaacaatcaactggttgttgatccaaatgaaaattcggttatagtaaaaaccgatcaatgataccctcatagtgcaattatcatatcattaacagtacaatattcaatgtacccaacctgaaaactaaactcaattcttcccgaacacttacgaaatttacataccgtatcactatcttgcctctccttataagtaacaatgttgttattatgtatttctatttgttatgcttttgttacgtttccatgtcaagatgttcctcatagacttcatgctacttctgtgactttcttaccttcactgcgaaatcttctaacatgaacatcgtaatgaatcattgcgaaaatatcctttttgagtagaatatatatcaaatagtaatgttaactgcgataagcgcgtaagacttgaacaccaatgctaaaacctacacatggttgacgtctagcactgcattcactaatgaagatagacataggagtagacaataaatgcggagattttgtgacgtatatgaaagatgaagctttcaattctcaactacattacatatctgccatcagctcatttcccatatctaaaatgatggaattactgccattatcaggaaacgaaacaatttacgaaagtgttaacgtactgtcttctgtagatttaagtgatttgaatagatgcatccgttcattatatcaaagaatcatattcagccctcttcctaaacaaagcgatgccaataccgatgacagtaacaattccaataacgctaatatgcaaatggaaactggaaagattaagacagacagacattggatatgtatcgagggaatacagaccatgttccagtactctcaactgaaagatccggtggaagcacacgcttcactgaatgatacgatgctccggcttcgtctgttacagaataagtgcccatcgatcgaaatactattcctactccccccgcatgaagccccagaattcatacaatcgctacaggagcatgatatttcaagaaataacatacctcatagacgacaagggaagagattcaagagagacaacacaggtattctcattggagactatatctggaagtactatatctagacagaagaatggcgcagtatatacgacatattcacagtatgatagggtaagattattctgtgtagaacttctggaaacgctttatgattacccggattgaaagtatctgtttcctccttggactgttttcctgaacacccgaacacccgacaagtttatcaaattcacggaaaactatattatttgtatgattaccggatattgcaaaattgttttttcgagaattacagtgaagtcaacaaccaccagaaggagtactgtgcgcgattaggccgcctgcgcaaatcgtttcttcccatgatcgccttcccgccaatcaccccagcctagcttctgactgccttggccagcctactgagaatcccaaactctctttccgctttggacgttactcggctgctcctgactactgtgactctgtctaggcgtaggcaggaatatccaggctgctcacaccgtcagtacgcccagttggtcctgtttcttcctatgccgtcctctggaatcctggtgaacctctaactttgtccatcgcctcattttcagaaagtgttgatagtatgaaattccaagagtgtattgaaaactagtaatcctttgataacatagtgcttatagatacttttataggtttggctcaaaagaacgagaacaaataacgagaaatgtcttctttcgaaccagtcgttgttattgatggtacgtaccgaacgaataagcatatctgatgatatgaatcagcctattgactatttaaattgagtttttgaacaatgaataatgtattgatttgtggatgcgaagaatgatgataagtcagttcataacagtggtacatgcaatgtatatcaatttgaacctgaaattataatatatgaatgcttagaaaggtcaactcgatgattttaggttcgttttagagagtatggagaaacagaaaaattgtaaagaaaacatggcacaacacttgcgaaccgatagcagggaaactaaattgtgatctaataatacatttggcatagcaagtcagcgtgatgatttattaaaaagatgtcaaatttttctatcattcaacaaattaatgcattatgttttaacaaactctgattatcaatggttttgattcataaccatgccttagatgacacttcacattttggataaatgcagaagcgccaccaccggcttgaaataagaaacaattttactaacaattattcacaattccattgtgtttcaaacaggtaagggccatttgttaggtcgtttggcttccactgttgccaagcaattgcttaacggtcaaaagattgttgttgtcagagctgaagctttgaacatttctggtgaattcttcagaaacaagttaaagtaccacgactacttgagaaaggccaccgctttcaacaagaccagaggtccattccatttcagagctccatccagaatcttctacaaggctgttagaggtatgatctcccacaagactgctcgtggtaaggctgctttggaaagattaaaggtcttcgaaggtgtcccaccaccatacgacaagaagaagagagttgttgttccacaagctttgagagtcttgagattgaagccaggtagaaagtacaccaccttgggtaagctatctacttccgttggttggaaatacgaagatgtcgttgccaagttggaagaaaagagaaaggctagatctgctgaatactacttgaagaagaaggcttacaacgccgtcgttgccaacaagtctgctactgttggtactgaagtttccgaaaagttggctgctctaggttactaaactccatcatcaaacaacatataaattttctaaagctcatcaaattgtatatcatttgtaaaacgttattaccatctttacaattttattaatattaattgattgatgtattgaatagttacattacgacaataataaagaagctatatggttcttgagggtatcgccctgggccgcgatttttttctatgcatgattatatatttgtataactgtccttgatctgagtactattctgtaatacaaaccatacatgcactaaccgataataaatagtcttttcatgaaatatgcttaaaatgttcataaactccgaatgttatgcaggtagatggaatggctcgtactaagtttgcaaacaaacccttataaaatcctgcaataccattagtatgccagatagatcgtattagagaattcattttactgttttcattatgttcagttctgaaggtttgtaaattagtctttaataattgcaacggatacacagaactgacagaaatcatttttgaaagtgatattatgcctatggtttctaccgcatttaacctcctttcctgtatatcatttctatcatgtaaatattttagtttcaatgtatcatatattgcaaaatacaatgcaccttgagttacaccaaataaggacggtactaaacctctccaaaatgtttttaacccttcttctgtataaattctagtaatggcatttagtatcgatgtgtatccttgactcgatttggtagacataattctagtcttaataacccacatagggttagtcaacagcgcagttgctaatccactggcgccagcagaaaccagatacatcgatgaggtcattttcctatcgttcatgaatttattttgtaaggctggctcagatgacaaactgtaaacgacatctttggagcaacgatataatccaaaatacagtccccatgcaactgcatttccgataatattgattcctaatccacggtatgcctctttaagtaattgttgagtaccagaaccatctttaatgatacgctgaacttgattgtaatagcttgacggtttgaggtcaatagcagctaactgaagcctcaatttgatcaagtctagtggatgagttacaatagtggttattgttcccgcagtcaatccagaaattatttccttctgcaatggactcaaaactgaattagatgttgcatccatcaggcaaaaactagtatgtacgcagatattgcaatttagccggagtagatgcaacacatatacaatttactcagtcgtaggatgccgaaggtagaaccagcgtctatattttttcaaatggtgacaataatgttcattatattttatggtaaaatattatatgctaaaatccaaatactggaataaacttaatataatgtaatatatttacaagatatacacatacatggatcatagatatacgtgtaaacaggacatattctgtaggagcatggaatcactcagcagcttttttaaacacttggcaaaggagataataggttcaatgggtgtggtctgttagaagtatgagtccagcccaagtatagaataaatggtaaccagccatagtgcgcaacggtttgggttagattcagaattttagtaatacgttccttggattcgtcggatagaataaatgatggtaagaatgccatggtggatctgttttcggtaatgtttgtctcttaacggttaaagttcaacgaggtcaagggaactgagcctgcaattaagatacattacctggtcaaagtgttagcacaaacttgtcttcttttgtaaacattttttttccaactttattcctgtatttcgggcaatgtaaaaacagtcacgtggtctaaaatattaaaagaaccttggggactgctatgagagaataagttcagtagtatatacagtaaatcggagagagtgctgttatgcaaagcgattgcgaggaatggtaaaaacatgagatattcaatttcttacattatatctatagaaatggtaattttttacatagttgcagtatgttaaatcgaattctttccatgcaaggttgtgggtcgaataagtcataactgacctacaacgttgttaaaaggaaagcgtggctattggcatacggtcgaaaaacttcgactaggagaattcgttttggaatgttggtgggtaggcttttttcttctttactttgaaattcttaactttattatttttgatcattagatttgttaggttctgaatctgttcataacaatagttccaatgggttttcaataaccttcttcaattccttcatgaattcaccacccttagcaccatcgatagttctgtgatcgaaagtaccagtgatattcatcttttggtcaaaggtgaagccgaattcggaaccagcatcttcgactgggaccttgttaacggtaccgatagccaagatggtagattgtggtgggttgatgatagaggtgaacatggaaacggcagggttcatacccaagttagagatacagatagtaccaccttggaattcttctggcttcaacttattatccttagcacgcttacctaagtccttgatttccttagaaatggaaacaaggcccttggattcggcgttcttgacgatcggagtcaacaaaccggttggggtagcaacagcgacagagacgtcaacgttcttgaactttctgatgacaccttgttctggcatccagtaagcattagcatctggacatctctgagcagcaacagcaatggccttgatcaagatgtcattgatggacaacttgtattggtctttagcagtagcgttcaaggattgtctcaacttcaaaagcttagaaacactaatttgagaggaaacaatgtatgatggaatattttgagtggattgcaacaaacggtcaccgatgatttgtctcatgttactgattggaacatcttcataagtggcggatgctggagttggggcagctagggctggagcggccttagcagcggaggattcacgagatggagccgaggccaagaaggcttcaacatcatccttagtgattctgcctcttggaccagtaccttcaacttccttcaaggaaacaccatgttccaaagcgatgctcttggccaatggagaagcaaagattctagtacctgaagaagcagaagatccagaggatttcttggcagctggtttagaagctggtttagcaccttccttggattcttccttggattcttcctttgcaggttgcttagcaccattcttggcagcttccttagcagcggtagcagattcggcgtctgcagcagtgaaattagcgaaagctggaacgtcagattcttcctcaacgtaaacagcaagtggcttgttcactgggatatccttggtaccagctggaaccaagatcttagccaaataaccttcttcttggaattcgaaatccatttgagccttatcagtttcaacttcagcaaggacatcaccaggctccaacctgtcaccaacgttcttactccattccgtcaaaccaccttgaaccatggtaggagacaaagctggcataccaatgatggtgtatggtgggtaagaagcatacgttctcaattgaagtctggcagcacaagccaagacgctcattcttggagcaactctagaaagtaatgcagacatttttcctagttcttttcttaatatatgtacacaaacaattgattcgttcccgtaacttggttaatacaattgaatatcaaatgtaagccgattttatcttctggtacagtcaattcctgtgtccaattcgtagtgaaatgtaaccttaataaatattgatatctcagttctaaatgaaggaggaaaaggcttgatgtattatttcaatcttcttctttcaagcgagatcaattaccaacaggtgtaatcagtgttccaatagtatcgtcaaatgcactagcgaatcacaatcatttttttttctcttgtgcaatctaatcgatgttatttacagataaatgttctcccatctaacctttttccttttatttcttgagaatttcagttttcagaattttcgaaatccaaaatatccacactataatggtgcgacgggatagaaggtgggatgaacagaaacatgcccgtgatccgctgcaaactgatagctgctagaagggtttccgtcgtgatagttataaagctttatataatggtatttctcgagatgatatttatctcaatcccaaacctgctcttgagctgtataaatgctttcacaattgatggagtagagtaacttaccgattaatatgtggtgtagggagtttactagtgtcaatttttggctagtgccagcggcctaaacggtggccacaattgtgccaggcaatgcaaatctcgaatgcgggtagcttatttcgtaatctgatgacagcgtcgcgactgtcaatagataaattcataatacgttgtatatatagatagtaggataaatggaaatgagtcagggtttactggtaccaggaatcaagtgtaataggtctgtttttctgttcgggtgcccactgcatttttttcttggtcattgcgtcttcttcccattctatttcgatggtagatttactatttgcgagcatcgtggcacatgtttgccaagagaaccgtaccatgtagggagaccatcccatcaatggtttcatctcgtttcgtagccattgaacggtttttgagtcaccaggataccctgacccaaggatttcatcttcggttttcttgcattgtgaaaggatgatatctctggtcacttttgctaccacactcgcaacacttacaatggggtaaatagaatcagcctttttcgcaacggtgaatttgcactgtgggaagatactttccaatttcttttgatacgagataggcggacccacggtatcgacgtacacgtgacctactttaacaccagatttcaatacatcgtctatcaatgcgattgtcacatcgtgcgcctgttcattcaaattgtaattcttttctggtgggaacctgaacatcccgctgctgatatcacatgcagttatagatgttgtagcgtatccaactccgtctatttctcctccgtagatcatggcaaacagtttctgtctcactggatcggttagtttcttagagtcgtcgaatccatatttgcatattacgtccttttcatattgacgcgtgcaatagctgataccataaaccatggggcccattacaggtcctcttcctgcttcatctactcccaggatgatctcatccgtactttccaatatcgatttgggtacttctgaatggtaggttttcgagtgtaacgaatttaaagatccagcaactgtaggtggaacgctcattccgtattctagcgcttgtgtagagtttgaaagcttcatattagcgtcgatctatcttcagtttatttacatgttcattactatcgtttgtatacatattttaacgttggtttcacgtttttttttttttaacatctttagttttggcgtttccttacaagtcccagtacaatgtatatcaagggaaactgtctagtaattttagagaggacatcgatgatatctcaattttggttatttattgcctgttgacatcgtcaagggtcccaaaacttaaaacttcctcaattcgctgtgtgtctgccaatagcatacacaatctatcaatacccagaccaaatccaccaatgggaggcattccgtacttcatagcctgaacataaggtagatcaaccgccatcatttcgtcatctttgaactgggttttggatgccaattgattagtgaatttctccaattgtaagtcggggcaattttcttcctcgtatgcgttcatatactctttacggttgatgaaaatttcaaaacgttttgtgatttgaacgttattggaatcagttttcgctaatggagataacactgtaggatgatggtatatgatagtcggcagcaaagtatcacactgtgattcaatgtatttaccacatagttcatccaaaatctgttgtggcgatacagacgattctgatatgctgatgttagcttttctcaatttttctttaagaagttcggcattattcaaatccatattgtcaaaatcgattcccgtcttttgtgttaatgtaggtaagaactccagtcttttgaatttaccattgttggccttaatttggtctaataattcttgtgctttgggtttatcgattccctgacatacatatattaagagggattcactcatttctataagttgctccatattgatatagcactgataaaattccaaggttgtgaattccgggttatgtgtagaatctataccttcatttctgaataccttaccgatttcaaagattttgttcatgccaccaatgcataaccgtttcaaccataattcaggagcgatccgtagttcgaacggttgttccttatcgatggcagtacaatgggtaataaaaggcttggcattagctccattagatttagaagagattattggtgtctccacttcaatgaactcctgcttatagagccattctctgattcttttagttaccaagtgccgtatgtatattgcttccgttccattaaccaagtaatccaacgttttattagagtttcttttgctcgaatcaagaagctttggaggaattggtatttgtgctggagagagcattttcaattctgaattcaccttaagggataatgttccctgcttttgagacacccccggaaatcctgttacttgaatgtgatctccaatcttgaactttctcatgtgtgcctgaaactcaccaacagacatgggaaggttactgaggttaacaattacttgcagcgatttctcatcatttaagaggttaatgaaaccaatcttcttaccggagaatctcatattggtgatctttcctcgtaaagtatgtgtagttgaacggtcatctacctttaaaccatcatactctttaatgaaacgagacacatctatcgtaggtttcggaatatttgatagagaagggtaccatttggttaaattcttagatatttctgcatttcttgtcctgtactccaagacaccggcctcggtcgagtgtaacctttggaacccgcgaaggatgtgatatgacctcaacatcggaaaggtatggttattacaacaaaggaacaccacagatggaacgaaagaataatgttagaattgaaccgttaatatctcttctctgatacagcgattgtttgaccgaccgaccgaacaatacgtataccccttccctattatggatttacaactcttctgccgtttctcatgaactagacttttatgatttcgatattttcttgttaaatttgaatactctgacagaaagatatgtacactagagagcaaactagcgaaactaagaactataaacgacaagagtatctacgttgatagaataaattacaattatgtcatagtgcatgtttcgatctcagtagttaaaaaaatctgtatggtttgttttccgatatgctgtacttaaacagccattcaatacgataacgcagtaattaatgctcatcattatcgaaagacaaaacacttgacaaataatactggatatagagggagcgaatactccccacccgaaggagaaacgttcaggttgttgaaaaaatatcaattgagatgaatagttcaagacaatatacactaggcacatttatccataagtgattcatttttgaagtctacataactattcattccaattaatatagcgaagcacctgcttcgcatatctggctattagtggacacgatgagctcactaattcgacatggaggtaggttgcagcctttaaatgatacatttccgaattagttggaaggtagtacttgtactttgaaaatttgtttgtggtttttatagttgttgaaagattttccaatatgctaatgaaataaaacaagaaaatagcatgtgatatagggcaatagtaagggaaatagttgcgaatttgcttcgattggctaaaaaatgttcagcataccaggtaccagtctgattctggaattaagcaacttacatcagcaaatagagtccattgatcacacctatatttcattacatgtgtacgagggttcaaaatatccgggtaaccaaactgacgtcttgtgatctgggctggcaggtcgtttttgatttttttctcttcgcgttctttgacgcgtctctattcaattcataaaataaaaagcacaaccatcattagggccttgacttcattgaaagattcacgttaatcttcactaacatagcaacaccagatatttgagaggttaccaaagaagagaacttcaccagataaaggttatatataacgggcttaattgtttttgcttccaatgttcagacaaaccaagaaacgtgtcgccaatagacgtaattttgtaggcgatgatcagaaccgaattgatgtaacagggtatgggaaccaagatgatggaatgcaatatgatatactataccccaccaaactcacatggtatcgcttgccacctaagggagagataacgttagaacagttcgaaacatgggctatcgacaggttaaaagtattgctcgaattggaatccttatggcaaagaaataaaagtatgaaagaaattgaaaccaccatcaaaccagttttgagctccaaattgaacttgggcaacgataatgaatcaagaaagaaagattactactctcatttcatattaaggttgtgtttctgtagatccaaagagctaagagacaaattcgttagagcagaaacactactattcaagattaggtttcaaatgttaaccacgcaggaccaattgaatttcatcagcagtttggatcttccatacgtaaattctattgatgaagaagagaaacaatctttgtcaacagaattgtatcaaactgtatctcatctgttgactttccaattgaatttgacggaagaaactcagagaagacagttcttcaacagagaaaaatactacaagttacctatggaaaatgtgatggatttagtcgggtcccgtcagatttttattaagaaaggatgggcatacgtgcctcaattccaacagttgaatcttatcagtaacgaatttagtgactgtttgcaaactgaactaatgggcacatatcaaatgattccaaaacttaacgaggatgatagaatcttacctattttgcatcatttatcctcggggtatgttgttaccgaatcacaagagttgaatggtgcgggtgtaaatgatgaattcacacatagatctgtgaagacaaaaaaagttatggaacacttcccattatgtgctaaacaattaatggaacaattacagacaaaccatcatctcaggtatcaaggccgtcaacagctatcgtttttcttgaaaggtatcggtctgtctgtagacgaggcattgcaattctggacggaatcgttcacttctggtggaaagatgactgtagatcagttcaacaaagaatataagtataatttccgtcacaattatggtcttgaaggtaacagaattaattataagccatgggactgccgtacaattctttccaagcctaggcccagtagaggagagtaccatggatgtccttacagagattaccatccggataaattagttgcgacgctgaaagagatgtccttaacgcaacaacaggtcaatagtgtggtagaatcatgccaacaacaagattacaccatcgcttgtaccaaagtattcgaagcagttcacaagactactacggctgatttgcagatagtacatccgaatcaatatttcgaaaggtcgagacaagctgccgccgctgttaccacaacgaattgaattaggattagaaataatcgaactaaatttggaagagatgcgactttccctggaaaaaaaagtgtaacgagtgtaccgaatcgacagaatattcgaaacgttccagagcaaaagcgtgtatgcgttaactgagcggagaagttgctattctaatctttccgatatcattgtcacggttgtgacactgtcgaagagaaaccatgctcatacggggcataacgagaatgcacatcttgaactaagtatatcaactgttgcagttacgtaatgcgagagcatgtacgtttagcagcagtcaatagcgattgaataacaaaaattctcgctatatggaggatgattgaatggccaggcaaaattcagaattattgcaagccatgcgaagcttgtcattccatgtcgtctcaagtgccttatcattttgaaacaaccaagtaggtatgaatatgaaataaattattaggaaaccagtacccaattgatgtcccacatcgatataatcgatacataatcttatatccgtctgatcttcatcctggatcggttataccaagcacgaattcattacgtcagcatacatgctccagtaccacattgtattggcacagacgcaaattacttattctttgcaaaaacgatataaaagcgatgcatgattccgaggagatacacagtacgaaataaacccagggtattaaattcgatattcgcttttgacacgtcgcattccttccaatgtggcactctaacatgtcttaatcctcctctttcttctgggatcttactgccgttctcttttttttttttttttttttgcctgtttggaaaagaaaaagtgaaagctagaatttgattgtcatctttggaaattgccgtttgaaatggaacaatggataagcgtacggggcgtctcaagggcacagtgcctcgcagaggcgcagtattccatacgataggtagcaatgttttctgtattattttagtacatcgtgcatactgataatacaatgcatgctttttttttcttacttttgctgtaataatattttctcataagcagaggctaaaaatgctcaaagcacgtctgcggtatcaattgtcctttgtttcaggtgcaatccaatctaagtcctggtttccgctttctattcgcagataagacgagagatgggttttccatatctggtaaatgtccattttcgtggcggaatttgagtggatgtaaggttaacgcagctgtgcttttttctacattggcccgcagcaacgcagagatggtgcgagagggacacacaacacactcagtatacttatcccatcacttcaatatctactctctgactcccaagactccaaccaaacacttaccagcttgatctttctaatcaagccaaacttgactgagacgtctgataaccacctgtatgtgccttcctgtatacgtatgtatataactctttcatgtgtctcacttgtgccatagacacgactgaaaagaaaaattttaagaagggaaaatccttctcaagagcatgttctagtccttgataggcttgcatcttccctacgcttccattacgttttttcctgcaaaaattcctgtcggtgcacgttatctgagcgaaatctacacgttcaccatcagagccacccaaagaagaatacagtctggccaaaagagcttattaggtagcattcgctccgtacgtaatggatggactttattatgcctctttccggcccgtttgttcgacatccaattgggtaacagactgcgaaatacacacctaaaattactgtcgttttgaactatctattgaacgctccactttgcatgaggttggcatcaaccaccggtattgaacacagaaaaaaaaaacaccttgttttgatggaaatcgtagaattggagcactgtaccattgattagatgtgaatggcaggcgaagcgcctgccattcatgatagtataatggtccgagcccaaactagaaagtgatacggacagctggaaattaactcgttcaattctttttttcctggaagcagggacataaaacgagaaacctgcaaataacatatacacaaacccagtagaaaactctttctaataacttaattaacttaacttaacctgtatatactaacttccccttctatccactggcgaggcattcttccttcccgctcttaaagcaacacgtaataccaatccataagcataatactatcctatctaaagaaggcgcgctacaggaaaagaaaagttttgtgaaaaaaaaaagattctaccacgctatatcactgtggatacgaaaacgtacatatatggtgccgattcacacagagagattgcgtgattgcatgccttgcttgtacatctttttcattcaatgggtatcggtatgcttctgaggaagcaggtcaaagagaaaaagaagaaaagaaagagttatattaatttagaataaatactacggcactgcaaattctgatctgagctgacctgatctgttctgatctgaagggaattgcattaaaaccttgtaatttccagctagaactgctctcttttttttacatcgctgtttgagtttcaatctggtttctctaagctgactgcccctattatataattcccactacagccggtaaaagatagacaagcgcttgtcgaacttccgtacagtaatcaagactctccacagaagaacggaaagaacacacaaaacatctttttatgctaacttgggaacttaacactaccttacgtttgcacaccattatttcattttttttcttgttccgtttattcttcttcttcttcttcttcttcttcttctctgcttgaagttaggaaggaactgaactgaaaaattggataccaagctaaacaaagaaaaaaaaacataattacctaattgttattaaaaagggccagttctctgaccagaaaaaaagataaccagttcgtccatatttaattaagtctggaaatcgaacgtagaggaataggagtaccagaactatacgttagttcactgatatctaggaattctctaggaacagttcaagaagagaccaaaaaatttcttcgaagcaaagcatttgaatccaatccaattacctagtatttgggtaacgtattcattgattttttcttcgcttctggcttttttttctttcttgaatttattcacttctattttatttcatcttattttgaactgcattgcattgcgtgtttttgtttgattcagtaagattttttgttattctgtctcattttaagcaagcgtggtctgctatcatacgtggggttgtactatcagttggtcgatcaagttaacgtcgagataacacccagggattgaaaggcgtacatttggttctgtttgttttttttttgggaaagaaaatagaggtataaacaagattttggattactcagattcgacctttgaattaattcaatctacaaagtggcaaagtttgcagtaaaaagcgttcaatctgatactttattccaattaataagttttgagggtttctgtatttttttttcactcattttcggattagtgaacacatcttcactgagactactatttactccaagttggttatatttctttctacgacctaaaagttcacagtgcaacaaattaagttcgttatcaattctatttggtttcatatctaattcgctgaagttaatcacgccatcttttgcttgtgttttatttgttcgttcatttcgcattgatttttgatataagatgaactattacggctattgggattacccttattatggccaaggacaaggtcaggcccaaggacatgcacaggtgccacctcaggctgcacctatgtcacagatacctgctcaggtgcctcaggtgcctcaggttcctcaagtggctcagcctcagcaggttcaacaggtgggtcaaattccgcaagtgggtcaaatgcctcaagtagcacaggtttctcagctcggtggtcagcctcgtcagcagcagcctaatgaagattctacttcgggaatattgcaacgccttaatccacaaaatcagtatctgggctatgcgcaacagcaaccaattcctcagcttcagcaacaaccacaaccacaaccacaacctcagcaacagcagcaacagcaacagcaacagcagcaacagcaacctcagcaacaggcacaacagtccccacgacaaccacaaccgcaggtgcaacagcagcaacaaccacaacaatatgataaagggttgccacaattgcaacccatgtcaactaatactcaacaaatgatgtattatccatactcaggctattctcactactatccatattcaggatactcttattaccaacaacaggtacctcaacagatgcctcagattgtttcacaagaagaggattcagaactgaaatcacaacagccgcagcagcaacaacttcagcagcaacaaactcaacagcaaccattagctcctcctattatatctagtgctgtaaactcacatcctgctggatatacccaatcgcctagctcccgttattatcagctaccaccaacttccacatatcaataccctcgattccaacaatatggtttgccgatgatacaacaacaaagccaggcttcaatatctacgccgaaatctaccaaccgcaatagctcaggttcttccaccaacatatcacagttcggtaccaatagtccgctggattcatttagtaacgcttcaccaaatccaaaagagttccctttgaaaagacgtaaatcaaataaaaaatcacacttgactccaactcaaccaaacaccactaccttctcacaacagggtcaaaggtctaaagtcacaacaactatgtgggaagacgagaacaccttgtgttaccaagtcgaagctaatggtgtcagtgtagtaagaagagctgacaatgatatgatcaatggtacgaaactattgaacgttactagaatgacaagaggacgcagagacggtattttgaaagctgaaaagataagacatgttgtgaaaattggttccatgcatctaaaaggtgtttggatcccatttgaaagagcattagttatggcgcagagagaaaagattgttgatcttctttatgcattgtttgtcagggacattcaatctatcattcaacaagaatccaacggcaagtatcagcagcagactcagcagcatcaacatcatccgttgatgtcattaccacaacagaaccctgtcccgtatgccaaccaccaggatgattcatccaaccatctcatggttctgactcaggcaggagttgccatgcagcaacagggaaattacaaccctaatccacaaattcctcactctaacatcaacgagtcttctgataataacagccaccaacaacagcaacagcaacaacaacaacaacaacaacaacaattcgctactcaatcgcaagttcaacaacagccacagcaactccaaacagaccaatcgctacgaccagcttctgttgacaataaccaggaaaagctgcaccatccagccggtcaactgacagaagctgaccaaaagcgtaatgactccaccaccagccaattgggagcttcttccaaacagcatgatgaaggaaattctaacacgaatgccaacccaagtaacttgaaggattgattttgtacccaaaatcagatccgttgtaactataatgctttattgactttagtacttctatataacattactacctcttaaatgtaaaagaaatttcacacggtgttattgaaactcgaggcacttgtttcagcaccttttgccatcatctgtactctctcgaacagcagcatgacggaaacgatcacatgtaaagtacatttacatctatcgacataaccttgttgtcacgtgatctcgatattttcattgttccgcttatgtcgatgatttaaaacaaaaacacgacaggtacctatttatcgtgttttgtggatgtgagcgattgatcattgatcatttggacatattgacatttctcacgagcaattaagtataagcgtgtcgtattcgtaacttattagcttctagcagatccagtaaggatgattcacaacggatcaacgcccagaagattcgtatttggaaacaatgacgcgaacgagcgcattgtcccggaagaatataagtacaactcatctatgataaatgaattgataaaacagaataaggatctccacaaacaggttacagaaaaacaagaagaaattgatagattgaacgtgctaattggttcgtttagggcaaaattgatcaaatacacagaactcaacaagaaaatgcagcgagaccaacaggaacagcaacataatcggcatcaatcttttgaatccaaaccaaggtacaaggctgaattcactagtgagtcttcttcacctgttagcaatgaacgagattctgagtacctgcaaatcaagaagaataatcgccatgacgagaataaaatcgatgacatataccaaaaactagagttacttacaaatctggtcaacgatgctatccacaaacaaaataatggggaacagcgagaaccctcaaattttaattctaggatagtaagcgatgatgatattataatatctgaatctcaagagttcaaacagcttcaagatcaaatagacctcttgaaaaggaaactcttgataaaaaaagagaatgaactgcgaaaattatcgttaaataaagaactagccgacttaatggacgagctaagtatgaattcttcaccatccgcaaatcaaaatattgatccatactccgagctgtcaagccgtccgaaatctgggcagcaaaggcgcactaatgaagatcagcaatccctgcattgcgaacattgccatctgaaaagtcatacccaaagtcatccatccgaaccaagatttgtaaatctaaaagaatctctagaaacaccaacaccaacacccactcagactcctagaaagctgaaaagggaaaaggatacaaatgttgcagataaacaatattcgttatggtaaatagtatgtttaattagtcttaggagagttcctctggacttttgtccagattgtattatacttatatatctgaaggtaacattcacgttagaatggtgaacgtcattctggaacattcaaagattcaaattagtctctacaacggttcctacaaggtcattgctgattatttcaattatgatatataatatttttcttgataagtaaatattcttagtttacagaaagttggatccgcaatcctgaagctggggcaccgatcttggatattaaagcaatgcgatcaatctttcccttctcagaaacgtgatagttcgccccagttaaaggatctgctacagatggcgatcctttgtaaattggggtatgtgaagctgcacagatatcaaattcagcataaggatcgaaatcaatctcgatggcatcatatgccatcgaatcagcctttgctttgattttctgagcttggtcagcacgggcacctgatgtaataatcttgaggaattcgcctgcgaaataggatgctaatacaaagttcttgtttttgaatgattgggtcatagcaacattcaaagcattacttctatgcacaggtagaagttttgtcctgctgaagtatgctgccaattccaggttacgcttaacgtcattggcaggtagagcacgacgttctagctccatagaaagacctaagatgtattcacgagcagttgcaagtgcagtttgtgctgttgtttcatcttctttgtcagtaactgctaacaaagctatggcatagataacgtctcggaagtgctcgatagcaacttccaatttgttagccttaaatgctttgaatccctcgttcaacttcgtggtgactacagaaacgccaggaacaaatggtagtattttagatttgtcctcctcatcggcatcagctcggatgtatccaataattgaaggtaattcatttggtgtagcactcatataagttcttgcaccatcgtatatatcaatgaatggtgtcctgaggggttcgaagtttacaacggctacctgcttattcaaggcttgggcagcagcatcaaaggctccagcggctactagaactgctggaagctttgaatttttaacccacattggcaattctgattcatctacttgttcttcagtcacttcggattcttcgatctctaactcgtcgtctaattccaaatcattttggtctaggtcccaagcatcttcttcctctccaacagcttcatcatcaaagtctaggttatcttgttctcctaaatcaaactggccaacattttgggtagtatctgaaacattttcttccttatcatcagaaatttcaagatcttcgatttggcccaaaagggctttttcaaagaatgagacttcagcttgctttaacggccagtttttcaaaggagcagaaatgacaggggtttttacatttgtggaggagttgagttcagttggtagggaaatgtcttgctcatcaatttcttcggattccaaaatggaagtggcaaggtcatcgtcgccgttagcttttgccactgcataagccaaaggagcagagcctgcatttaaaaagacatttgcacgcttctgaactgagttattgtaaaaggtattttgaatcaagccggaaatatctgatctatgttcagcaatagactccatttttgccagtttggagttgtctcccttaagtagatataggaaagacagtttatcaaactgcttagtgttttgatataccaattcagcgatatctgtgttaccttggatcaaagcttctttgcccaatctttcccatacaagttcattgttcaatttctcagcttcttcaagagcaactgtcaaattaccgtattgtgtagccaaatcaaatcttgtttgaggatcctccacgaattgtaacgcaatttcaggatagcctgatttttgaagataagatatgatgttttgaccaactaaatttgaatttttaatgatacgcaatacctcagggaaatttttgttgactaaagtcttcttgaaacgatattcagtaggatcaattgtcaaaatctctacttccccttcacgattcaaagcatagacaaatttgccatgtaccttgttgatgtataatgttctttctaaggttttaatgataccagaatcaccattcaatagacagtatttgatatggttcaatgttgaataaattaggacaccggtttcatcccaacttgcactcttgattctaatactttcatggtttgatgtaacgatttccagttttctgtttgcgattgtcaatgtatgcttactcatcaatgcaacatattggccatcttgagaccacactgtatacttgatgttctttaaagataattcatgaagaattttaccttgttggacgtccatcattaccacagaatgagaatatagaatcaaaacagtaccaggagcagctaatgtgatgtctttaacagtatcagttaatttgattgactttgtggttttgttatctaaactacgaacctccaagctattagtgctgccattgtgcaccacaaatctgttacgagcaacgaagatcgcaaaactaccatcatcagagatgacgttgctagcttcaacagctccactaggttgtttaggtaagacacataagctgaacctgttggcttccttttcggaggagttgacaaggacggaatgttgggatgggttataagacatacttctaaatgaactccaggtcttgccgatgtttttcaaagaaagataaggtagagaagtgattctcttgtggtaatcaaacatttggacttgtttctccctgttgataaagaacaactgattttggtttatagcagttggtggtctttcacggtccaacttaaagatcataataccagaatcatgagcagcaccgaacagatttaggtttgggtgagctctcactaaccagaatctgtcattttctcttttgaactgtttaattggagtacgcttgtccaagtcccatactcttacggttttatcctcaccaactgatataatgagattctgttgaggatggaaaatgacggaatcaacgttgttggtatgacctctacaagtatcgacctcccatgcctttgtggcactcattctccacaatttcacttgacgatcatcagaaccggaaacgatcaatggtaaagttggatggaaagaagcccaatttactcctctagtgtggccttctaaaatgaacttcaccacacaatctccaaatcctccgtcaagtaagttctgttgctgtctcatttgttcttcgaatgattgagtgcctggtgcggaatgtctttttcttagccctgaaatatcccaaactctaacggtttcatccaaagaagcagaaaccaccaaatcttcgactggatggaattgggcacacattacgaagtggttatggccagttaaacatgctatttcctttctgttctgccagttccagattctgatggtttgatcgtcggaactggaaataatccatggcaattcgtgatggaagaatactgtacgaacatagtctaaatggccgtccaatgtgaatagacacttgttgctctctaaagaccatactttgatagtataatcatcacctgcagaaacgaaaagaggttgcgttggatggaaatcaatgccacgtaccggaccctcatgatcttcaaaacggtgaagcaaaacacccatacggtaatcccataattggatggttgatgagaaaagtgctaccagaacccaaggcctagacggatgaaaagcaatacctttcgccctggtagactttgattcgaacttagttaacatcttcatgatgaaagcaagcttttcaagacttcgatctaaatctgagtaaaaactgtgagaaatataagaagaataactcggaagaaaacgtcacaattgcagttaacaatataccaattggttacgattgaagctttccttcgatggttagtcctcactgacaactcaattagacgacaaagtaccttgatcgttgtttattagccaaagtcagcttcattcaaggttcataaaattacttaaaatacacatatggcttactattttgaaataagatcgtgttttatttgaaaagttgtcctttttgaaaattggaagaatccgaagagtatgcaaaggacgtaatggtagggtaataattacccgaatttgtgccagacgcatctctacagattctatgcgtaagagaatgctagaagagatagcatatacgagagtggtatacataggtctatatatctatacatgtatagtgtagatgtgaacatctgggcaacctttactgattaatgtagcatattaagcaatcttttgataggatttctgttattgtgactggaacccccatttgtggtagcatcgcgtgactgcagagcgtttcgtaggagcaaatcttgttcttcatgatttttttccgatggtttattagtgtcttgaataaacctgtttgaaggactctgatccggcccatctccctgctcttgcttcaattgtttacctaccaaaagactttgttgctgtcttcccggatttaggccattcttgtccaaggaagataaataaggtaatttgcccttcttccaaatgactgaatcttcaaaccacgtatgctcattaaacttgtcataattgtaatcgtaagtaatatctaacaatgaattagcatcaataggtaaatgtaatctttctagttcatcaactattgatggccagaatttgttttcgtaaggtgtaacggctattgattccacagttgcataaaattgacccttctcaagtatatcgggcgagttttcccaatcaatgagccctccagcccacattatggtaccagggtcagcatcttctcttccacctggccacaccgacacttgcaatctcattggtgtttgtggatattcgtatctttgtttttcctcattccatgtatcttccttgtataatgttctagctactacaccgtccacaatccagttgattctatcttggtcccaatcgacttcgtaaatatgagtattttcaaaactgtcagaacttagttctagcttttccatccttgtgtgatttaattcaccttggtgataataattagattgagcatgatgtaattctcctccaataaattcaaaatcaatttcatcacctacagttgaaattaataccactgcagtaacaactccgcgacctctagctgttttcatttttacggtagctctaccgtatagaaaagatcttgtggatgatattaaacttcccgaagtatgtttaggcatagcaagagtcaattgaccaggtgcatcgtatttaacaaatccactgtacgtgaaatgatagtctcttaacattttcttaatgattcgttcttgtggtgatattaggaagttagcgaaattaactatacctctattattcaagtccttttctccaccttcattcgatgcaacgtccatactgggttgtactctaggcagaaagctactttttagagcaggtttttgctccagtgagctttgcaaccagaagctaggcgacattcgtggtaataatgctggttgtcctaagcaactacctggatcgtgagataatcttgggttacaacctccaacacaaaaaggacccgtaccgcattgtccaaattgtgagcaacatggccattctgcaggacaattattttcaagagagcagcctattggagtttctgggaaatacctagtagcttcttgtgctaaagttgaaattgtgcaacaggaaatccataacaaaatagtagaaagcattgcgatgctagtaaccaatttctgcgttttttttgtttatgaatacagatacaatttgaggtgtagtagatcaagacaagctgccaatgatagtgtcattgatcacggatgtaaattcttgaacatgatagtcgtgatttttagatccttctccttctgcttttataggttggcttgatttctcataatttgacgtgcgacaatctgttgcgaagaaagtagaaaattgagtgacacaaaacattagattaagatcattcatttagcacaagatgtgatttcttcaaaagagcagctagtctttaacgaaatatttgatttttggagtgtaaactcttttatggcattgctcctttttggcaaggatcatagctcttgaaattatgtgcttatgtatcttatacgttcatagtataatggtaatgtcttgatttagtggaatcaagcaggtctgaatgttggagtattcaagatctatgagcctttaaacaacaagtttcagaatctcttcatcgaattcgatgagtttcttttgttctttgagtttgttttgaactaaaatcaacaagttatataacaactttagtgtaggtgtttcaacaccattagccttagcgattctgattgggttaccaaggataatttcaagttccatgagccttccattttccagatctacacacatggaaggcttataaaggatattcctagtaacatcgttgaagaattctatcaaattctcatcaatggagacgtcctcactggcagcaatggagacaatctcttgcatggcaggtctgaacacctcgaattcggttgcttttttctcgacagagaattcaaagcatctaggaacgtctaaaccgaccaatgcagtagttgtattgatcgctgcgttgtacaacagcttgttccatctggtcttacgaacgttctcatcaaaaacaccagtattgtgaccctcgttatggtatatggagaccagtttcttagcctgtcctatggcaatatcatcatccttatcaaacgacccgaaactaacgtgatctttccccttttgaacgatatgacccggtcctaccttggtggaagcaatcaattgaacacccgataatagacaaagattatacgtcgctgggttgaaatgttccaaaacctctttttcaatatcgataccattctgaatcaaaacaacgttggtaaccttttcgtcatttaatttgtaatttgcttcgataactggtttcaagatagcatgaacggtagaatccttgggcccatcagggatgttcttggtggtgataatgatataatcaaagaacttttcagcagaagatgcgtcctcaacagtcttatagacgttatgaggcctccaattagtgatttcaccgtaatcacaggagtcaatcttgtaaccaaactcaacgacgtggtcataatcggatcttgttaccaacgacacctctgacaacccacaatggtataaagagtatgcggttataacccctacaccaccagctccgatgattaaagcgcttgacgtttgttctgaaggtgggattatgtttgaggacatatttgattcaattgccttattcccaatttcaaacctttatagaatcattgagactcctcttgaaagtgttggtggtttgttcaagttgcagccatttatcattctttttttgcagaagtgatagcgaatcatttgaatttttataaagagaagtaatctcaagccggacttccatatcattagagaagtgcaaacgtaatagagaagaacaacataaaggccgttctggacaatacactgtaaagcatagtgtcgaacgcgtatatctaactttatacacaaagcataaattcgaatggacggtgtgtcacgtgactgtgttgcttcccactttgaaagtgtcaaaggtttttgattctactactatctcttcttctagtgttaaatacgccacgcagtcttgttaaccgacccactaatcaatcaacactttacatcttgtatcttgataaaccttagagtcatagccaactggaatatcgcactgaagttcgtttctgcttgtaaaccttctcgaaatttgctcgacacagagagaattcatcgggcaaaaaaaaaaaaaaaagtttcaacggtactgtcagtgaatgagatggttcaaaagtgctcaggtgctcaattgttatttgtaggtttattcatgtctactttcaagccgcttcgaagttctcatttcgcttacctacccaagaaatttttaatttcaaagtttacttttatctatttctcttattgatagagatgagctaattaatagagcatattaagctcaactcttgaagagttctactccacaggactactcacgtaactagcatatatcggtcgaatcacgaaacagtagggcttcggggtttcaactcatctgggtgtatatatatatatacgctggtgattgcctgaagatcgtaacataaatgctgcaaagtggaaccgttccgttatagaagatagccagtctctatagtttcaggaacaagatacacttatagaaaagacgaactaacaatgagattatctggtttgctaatatggattttagcatggtttcaggttcatgtacaggcattggttttgattgattcgacgctagcgtccgcttgtgtttattatgaattgcaatacgattggggttgtaactcgcatagtaatggtatgaaggcatacgcatgcagatgtggtaatgctgcttggttaggatcagtcacaaactgtgtatatgagaatacaaatagtacgaggttgagaaaccatgcattgaggcacatctcgacacgttgcttgcaaaaaggtgggttcgagtattctttggccgacatgcaaggtttctacaagaatgctacatcatatttgagagagccaactaagatggatttgacaatgccagttgatttgccattgcgggtgaacgaaagttcatacgcatattatcataaagggttcaaagacttcactttctctgtacaaagatcgcaatggtttggctggggtttggttttctattgggccacgatcctcgtgttggcatcaatcttcaatttatctaagagagtgtttgggttcacatgggaaactaactggattagaagaactcttacgttaccatcaacctttggtaaataccataatagcccttacacactatggaaatgcttccagttctatttcccaactagactgcaatcctgggttattgctgtcttcctaatccaaactatcgtgtcttgttgtgtgggttacaacacgatatcaatgcctcatccttatttgacttcgagatggtacgctaatttggatttgatttcatatagaaccgatttaatggctatttccttattcccaatcgtctatttctttggaatccgtaacaacccattcacttgggtcactggtatttcgtttgctacatttaacttgtatcacaagtggactgcatacgtgatggtaattttggccttcattcattccatcatttggactgtctgggctaagtctaaggaaggtggtggttaccttgcttggtggccagatgcttactggcagtggggtgtcttcgccactatgttgtctttcttcatggttgctcacagtcataaatggattagagacttagcttatgagtttttccttattttccataagttattcaacgtcatgttcattgtttgcatgtactaccacttgaataccttaggttggttgggctgggtttggtccatggtcggtatctggggttttgatagagtaatgcgtttcgctaaaattattctatgtggtggcttacaaactgctaccgtcactgattgtggaaatggtgttatcagaatgaagatcaagaaccctcgactccttaaattttaccctggctcctacgcttatgtgtacttcttctctactagtgacccatggatttactcgttccaatctcatcctttcactgtgctgtcagtgccagatgaagatgagtccaccttaacaattatcttcaaagctaaaaagggtataactagaaatgtcttgaaccgattattgaaatctggcgttgatgaacttaaatacaagatctttgttgagggaccatatggtgctgcttatccatgccacaagaattccacccgtaaatttattggtttggccgcaggtctaggtatcagtgctgtcttccctcatatcaaatccgtcattgaacaaacgtcaaccaatattgttcatgaacttaaatggatttccaatgatatgaactgtttgaactggttcagcaaagaattggcgtggttagcatctaataattgcaaaattaccttcatctataccaaggatatcggctctgatacggaatccgtatccgactactcagaaaagccaaaatccatacaagaccaaaagatttcgtctaaaattgaagtactgacattcagtactcgtccggatatgaaccaaatcgtgcatgaagccatttctagtagcgaagaggacatttcttttgtatcatgtggcccttcttccttcattgatgtcgttagatacagcgtcaaaaaagaattagccaacactaaggtagacgtcgatttagaagaggagtcctttacttggtaatactaccaaagaaagatgagatagcggccagcaaggccgcatgaaatagcatgaagcagaacattgagtaatttatatcccagcgtttatttattccacaaacctattttttaatagttaatcatatcagtactgtcaatattatttacatttaattatagccttaactatataatcaattctcattataaagatactcgcatatagcttgaaagccattagagaacatgtgttagagtgtgcttttattagattcaagggtacggcataactacagacggtatcagttatcgtgcaaattttgaaggtaatttatccacgacatatcgaacttttttcgaacataaataggtaaaattgtagataattatttatagtgggtgtgccatgcagtttggtgaatggcaggtatcctacgggttactcattggtatttctatggacaaagatgagcgaattatcattggccagagttaatgcatggatgctgatgaataaagaacgtattattattcccttaattgctatcactatcgctctccgcttcttgcatcttaaggatctctttccatttatatgttagttctctcattgactcgggatctaaactagcttgaactacatctttgggtacttggttctctgaatgctctttggtgacgaatctacccatattgtgttctgtgatgagtctaatttcaggactggcatcggaatctaaatctttcgaagccaactcgttccaggagaaaagtaacgggtctgtagttcttgaccaaggatttatatctatcagccaacatgattcaaagggtctgggtaaatatacatccaacacaaaagactttaggtcgaaattgggtagcacgatatcataaacgaattcctcgataaggttcgtgaatgtatcctgtaaaggttccaaataattataataattcaaatccctttgtgatattccccaaatttcagaatctctgacgaacaccctaaattccagcgcagggtttatgtcaaaccatttccttaatactagttcaaactggatagactgattgtccgaattgtccctatcctcacattcatcaaacgcatgatccaaatcgtatgcgatatagttagacgcatttagtaaaagataaatgtcattcacattcatacatttggaagtattattgggcaaaatccaagtagcatctcttggagcagaccagttgagtttcggcgtgactgcgccatactcaccaatcacttcagcaatctctctatgaagatcggggaaattaaccataggaaccatctcttcttctttcccatttttatcatcgtctgagtcagaatcattatcaccatcgtcgtctgcctcccaatcactgtactcgttatcatcgtcacgctttaagcaatgatcattatacgtagagtcattctcttccaaagaaagccttatcccgtcctgagccaaatatcgtagaaattcctcgggcagcggttgaataatcttagcctttggtgtatattttttgaacttatcgtaccatgatgagaaactacatgccctaatgtcatctgacctcaccttaatatcaactaaaggtgtatagctttcagctgccatgtcaaagaagaggaaacaaaccgtttaatgctgctatatatcaactacctcttcctaaacatacaaagtcggataaagcagctgcacttttgctattcgagcttgcgatgagatgtcaatgagatgatcttgacctttcacatcaaactaactaagagaaaaggttgatcagattctgaatatcacgtgacttgggattttgtcttgtcaatgtgtcatattgcacgaaatatcaacctctagtggcaaaaaaaattgttctatggccctttctttactatgggagaagaagtgaatctcagtagtattgacgaaagatcgaaaagtactgaaaatgacattttattttgattttagttactaggaatggttttgattatggtgaaataaatgatgatgggtttgattttgaagcaaagaaacacacataggcctcattgtttagtttgtattataactgcaagtgactttactcaattctttagcggaaagttctaatttgttttggcaaagaactacggataagtttatcgtttggtatttttccccaatcgtaaagagagtttgaaaagatggtttcacaagctaaacaaccttccaatgcgacctttaagaatcgtgagaagccacaagaagttcgtaaggccaatattatagctgcccgtgctgtggccgatgcaattcgtacttctttgggtcctaagggtatggataagatgatcaagacatctagaggtgatattattatttccaacgatgggcataccattttgaaacaaatggctatcttgcatccagtggctaagatgttggttgaagtttctggtgcacaggatgttgaggctggtgatggtactacctcggttgttatcatgacaggtgcactattaggtgcagctgaaaagttgttgaataaagggatccatccaactattattgcggaatctttccaaagagctgctgaaagatcggttgagattttgttgaacatgtcaacgaagatctcgttggacgataaagaggctttagttcgtgccgcatctacctcgctaagttctaaaattgtgtcacaacattcttcatttttggccccattggccgtagactgtgtgttgagcattgcctctcatgattcgactaacgttgatttgaacgatattcgtttgatcaagaaggttggtggtaccattgatgatactgagatggtaaatggtgttgtcttgacacaaaatgcggtaaaaactgccggtggaccaactagaattgaaaaggcaaggatcggattaatccaattccaaatttctcctccaaagccagatactgaaaataacattgtggttaacgattatagacaaatggataagattttgaaagaggaaagagcttacttgttgaacatatgtaaaaagatcaagaaggccaaatgtaacgtgttgttaatccagaagtctatcctaagagatgctgtaaatgaccttgcattgcatttcctctcaaaattgggaataatggtggtcagagatattgaaagagatgaagttgaattcttatcaaagagtttgggttgtaaaccaatctctgacgttgaactattcaccgaagacagattaggctctgcagacgtagtagaagaagtggaaagtgatggttccaatattgttaccatcactggtgtaaagacaaccaacaagaacccaacagtgtcagtcgtcattcgcggtgctaacaacatggtcttggatgaaactgaacgttctctacatgatgctttatgtgtcatccgttgtttggttaaagaaagagccttgattgcaggtggtggtgccccagaaattgaagtttcataccgtctaatgaaggaagcgcgtaccatggaaggtgtggaagcatttgtttggcaagagtatgcagaagcactagaagtcattccaacgacattagccgagaatgcaggtttgaatagtttgaatgttgtcacggagttacgtttgagacacgaaaatggtgaatccaattctggtatttcggtaagacgttctggtacctcaaatacttacgaagaccatattctacaacctgttctagtatccacaagtgcaatcaggttggcttctgaatgtgttaagtctattctacgtattgatgatatcactttcagtcgttaataggccaatgtagtttcttctcctaaatagatttgtacattaaaaacgaaactgataatatagtttagaataatattctactcctttagaaatattaatactaaccagctatatacaagattacgattggcgttacgagcacgagatggatttgcctttgaagcaaagttgttctttctaaatgcagacgcaaagggcgaagatgtatcgaccaaaattatgcaatttatgagtatggatggcgagatggtaaaaataactcacttcaatttactcagataacggacagcatttttattgaacacgtaggatgctccactccatactgtcgttacactgaccaaatagcccagtaaagtaaacgcaaattgactattttccttcaacaaaccttctttgccttcctcctcatctttagtgttatttatgatcaagaggacaacaccaaatcctacatagatcatttgtacgaaagtgttccacttcgaaatttgcgttggtttaacctctgcgcttggataatggaaaatatcccaatacgagttccatgtaacagagccgtaacgatgcttcattgatgcatacctgaaataaatggcactcaaccccaacaatagatctcttccgaaaataagtccagcaaccgctaacggaatgatttgggggccagaaggtacgcacaaagcggctgtcgttgtcatcattaatatcttatctgccattggatcaagaactgttccagctacagatttcatcttgtacgatctcgcaaggtacccatctaaaaagtcagtgacacaagagtacacgaataaagacattgcgggggcaaggttctgagttaagatgtagtaaccaatcaagggcgttgtcgctattctactcatcgttaacacgtttggtaaagtccatattccattagttatcgcgctttttgtccgttgctgttgctgctgtttcttctctggttcctttaccaaatcacgattgtcagttgagtagaagcgctgggagtgacggaaaggccgtattccaataatttgtttcagagccttgcttcggctaaactgcaagtttgagcttattccgttggttttctgtacgattcttctcaatccattcacttgcttcgaaatggttaaaacgttcaaaatcattgtacccaaaatgacggactttcttaacgttgaacaaccagggaaataggtgatataatgctgctggttataccttccaggttctgatcactcaatagtttcagtgaagtcgctgacttcctggctatttaatctgtccaaccttatgcttccggtgtacctcatcttgctaaaaccgaagcttccatactttttttttttagtgcagagttttgttagttttctatggagaatagaataggtaacgagacgagactaagcccggactatgttgttatgcaattctgaattacgatcccttataatgactctgttgttcttataatgttatattgcagggtatgttatctgttgtctactaaagggttgtatcaaatgcctgcgttcaatcccttatagtatcttgaatcatatcgacatgactaagtgcccaattttccatatttcaacatttcggcatttcaacattttaaccagactttgattgagcagctttgatttacaaacagaataacaagtaggttctatattgtgtgattgactcttatgttattgtatcaagatccaacaacacccgggatttcaattgttaggaagggaaacatataaatagtgcttacctctatcaaaagtgttgtgttataagggaactatttctttattggtatcatttccaggttgattcgtaattggacaagccggtttacatcaggagctctaagaaggtattctgctgctgcaacttcgtcttcatctgcaatgaacgttttagtttataatggtgcaggtacatcacctgagtccgtgaagaatacaattgagaccctacgattattgttggagccatattacgctgtttctccagttactgcaagagtgttagaaaccgaaccttggactacgaagacttccgtggtggtatttccaggaggtgcggatttaccgtatgttagagattgtaagaaagtgattcccaagatcagagatttcgtctccaaagacggtggtttatacatcggaatatgtgccggtggctactttgggtcaggacgttgtgaattcgcaaaaggtgatccttgttatgaagtcactggtccaagggatttgaagttgttccccggtattgcaagggggcctgctttcagtggattcaagtataacaaagaagatggtgccaagactgtcaagttaaaagtaaatggaattgaaaatctccaagaagcttactcctactataacggtggtgcgcttttcgttgacgccgaaaaatatccaaacgtcgaagtactagcagagtatgaagactccgttgacgttcccttctccgatgatccaaatgctgcgaatcaagatgctactgctgctgctgctgctatagtgttatcaagctttggaaagggtaaagcattatttatcggtccacatccagaaatatctgctaagaatctaaagccaattggagaagaatggtatgataataaagtcatcaaacttctggaagaacatgatacatctagatttcaattgatgaaagaagtgttgagaaaagctggattgaaatgtaatagtactgagtctaaccccggaaatccagacttgacccctatatttgttgctaccaaggacaatatggcagaccttcgtgaattcgaggaaaatttacgttcaaattcagctaaaacggatgattctggagatgcataccatttgaccggcgaaaatgatagctttgatatctatgaaggattttctcatgcggaagaagcaagtttaaagcttcaagatgtacaccctgttgatgctgttaaacaaatcatatttcctgcgaatgaggaaactgttcctggtaaaccactgatctctcattttgatatgcaaaaattctttgctcatttgaatccctcgagtaaattgggttccattcttctatatggggatgttgttacttccacaagtatgattttggaccagaataaaacattattggcagcattacctgaaaatagggctattcatgtgggtacaattcaattattaggtagaggacgtggtggaaatacgtgggttaacccaaggggagttcttgcgtcaacaactgcaattaatttacctgctgtatcaccaagttctggagaaagaactccgatcgttttcgtgcaatatctagctatgttagcttactgtaaagccatccgcacatttgctcctggctatgaagatttaccagtgaagatcaaatggcctaacgatctctatgcaatgaaacctcaatattactataacaataacatgaaacttttggggaaagaattccccaatggattaattccgcttgacgacgtcgacccggcatttgtaaaggtatctggtcttttggtaaccacaaatttcgtatcaggaaaatactccttattattgggatgtggggttaacgtaacgaacgaagctccaacgacttccttggcgacatgggtcaaaatcttgaataatgaaagagatgctttaggaatgccgcacttaccgccaattgatcatgaaatacttctagcgaagtatctcaacgaacttgatactttgttgaaaaaattcttgatgtacggaccatctccaatcttgcccgagtactataaatactggatgcattccgaccaaattgtacaactattggaccataactctgtcagagcaaaacttgttggaatcaccgaagattacggcttattgattgccaaggagttgattgctggaagtaatactcatttcaccggaaatgtttatcatctgcaaccagatggcaatacgtttgacattttcaaaggcttgatatctaaaaaagcctgaaagccatatatattacttatttagccttatagtaccctacagttacagtcaatataatgtggattgtgcattaaattacgaaccttaaaaaaggtagatataaaactatactaaaatacaaggtctgaagatgttcgtctctaaagctttatcgtgaaattttaaattccagaatagaatgaagttcattaatatgttaatgataatctgctgcaattcgcagaaaacataattattctcctgctcacttattttctttcttctcttcgtctgattcttgttgcttaggttcagctggagaataagaaccaggactgtattgtggtgaggttggtgagtaagatggagaagtaggggaataggatggtgaggtgggggaataggatggcgatgttggagaataggaaggtgaagtgggagaatatgatggcgatgtaggagaatatgaaggagaggttggagagtaggagggtgaagtgggtgaataagatggtgatgtaggagaataagatggtgatgtaggagaataggaaggcgaagttggagaatatgaaggtgatgttggggagtacgatggagatgttggggagtatgatggcgatgttggtgagtaggatggcgatgttggtgaatacgaaggggatgtaggagaatatgatggtgacgttggtgagtaagaaggagatgtaggtgagtaagacggagatgtaggtgaatatgatggcgaagttggtgaatatgatggtgaagttggtgaataacctggtgaggttggagagaatcctggagaggaaacttctccaaagccaggggaagtagggccgttaccatatccactgaacggagaggttgcagaaccatagtcggccccaccataagcagtaaatccaccagcgagagcgtctgctccccctgattcaaccaaaggtgagaacattagttcgtccttaacattaatctctgcgtttgcaagaccactttcgttggaatatggtgtagcacctccttcttggccttctgtcttgacttctttatgttcaggcatgtatttcactagagattcgtcatcaatcatgacgtcaaatgcaccggtaccaattggcgccatttgacctaagatgacattctcagagacaccacggcaatcgtctaactctgctgccgcacctgcctcgaatagaatttccacagtttcttcaaaggagcatctcattaaagcaccagtgtcggctctgttgaacccgtgacgggtaacagacattaagaaaccttgtgatgtcatgacatcgactaatagagccatatgacggtaattaacataagaaccatcggaagcaataacattgtacacttctctgtataaggccgcacgaccagcctcaatacctaatacattcattatgtcaatgaaggagtttgtgtagatacgtgagccatctacaccggacactgtcatgacttcagaaagattcacaccatctgtttctagaacccattcgggaactttatggtattcaccggtttcactagggacttttctatcatacttcatcatcaccacacgtgtaatatcttcgacaccacgcagagtgattttctctaacatagaattttcgattttcttcaacatgtgatcttcctccgcttcgacgtctgcgtccaaggtcttaggatcacggataacacgacaacgaataatcaatttctcagcattatcttctgaccatataacgaacaagtcgttcttgaatgtctccttgattttttcaccgacttgacccatagttaagtctttatcagtcattgccgcacgatcaagttctagacgtaataaccatggagattgataatctagagatttttctgtttcctcatccatcaaggagaagtgtaactgaataatttcctcatcatcttcaatgacagtcgaccgagggtctgggtcataataaatttcagatgcgacggtgacactctttaaagttgtgtgttcaatagctgaacggatttctttagccttctcttggtcagcagcgtactctggatctaaatacacagtaagagacggggtcttcatatttttggcgacatttaaaatttcctttaaacgaggaacacctgaagtaaccttcttggaggccacaccagcgaaatggaaagtattcaatgtcatctgagtggcaggctcaccgatggattgagcagccaaaacaccaaccatttcacctggatgaacaatagatcttaggaattgtgcttcgatattgtttagcacccaatcaaaggtctgtctgttcaatctgtattcttcaatcaccctacgtgtagctagacgagaacgcaataagcagcagaataacgtgattgcattttgttgagcttcttttaagatgtcactcttcccacgtacgactagaagcttctcctgtaatttccttacgcctgaaataacatcttcaattgttaaatcagttggtttggtttgatcgatacggaatgtttgctgtgagttctggataatacgcttgatgttaacaggtagaggccaattgtgttcaccatcgacaaacacccttctcaaaatttgacggtcatcaacaagctgtttgtactcatcgttaagtagtaattgcaattttgagtctccgataatttcggatcctgattccaaaagagagggatccaaggcgtactcctcatttaataggtcgattctgtaacgcctttcgaaagcactatcagatccaggaatagtatcaattgactgcttttcgatgtgcgctgcatccataccatcttcaccatagatgaactgtataacattccctagagagtttcttgttgtaccatcataatggaccatgatatcctccaaagctttgaccaaacgacgttgaatataacctgtttcagctgttttcacggcggtatcgattaaaccttcacgaccacccattgcgtggaagaaaaactcttggggtgttagacctctcaaatatgaattttccacgaaacccttggattcaggagaataatcgtctttggagaaatgtggaagagtacgatcagcgaaaccgaaagcaatacgtttaccttcaacagattgttgaccaacacatgcagacatttgagcgatattaataaaggaacccttcgaccccgcactaaccatctgcttgacgttatttaaatctttcaagttgacttctgctgaacgaccagctttatctctagcttcgtttagataacgaacgacattatcttcgaacgattcacgcaatgtcataccgtgttttgccgttaataagttcgcttgagcctctttcgtgacatcttcgaccttcttcttggcaacagcgatagcttcagtaatctccctcatggttttctcatcagcaatggtatcaccaataccaatggagaaaccattatgcaagagccagtaattgacaaccttttggatgttactgaagagtcttgcgcaaatttcaggtcccttttctctcgtaaccacgtggattaaaccaccactagatgaaccgacggtcttcttgtcaacaacaccaaaaatgattttaccatcaatgatcaacataccattgtcttttggtgataagaaagttgttccatcatcaaaacgttgtaagtgaataccattaggaatagccatggatagcacttgcttacccgaccatagtggtactggcttcaagattgcaggagtggggataattccgtcccagtcaggaatccagtaaagcatattcaacacttgatccaattctatgaaagtgtctcttagagtcattttacgaataccacataatgtatcctgcacaatacccatacaaggtttgttagattgtggggacacaatttgcaaaggcactgcacataactgcgacaattcggctctagtctcttcagattggggaacatgtaaattcatttcgtcaccatcgaaatctgcattatatggggaagtgacagataagttcaatctaaaggtagaatatggcatgactttcactctgtgagccatcatagacattttgtgaagggatggttgacgattgaaaagaactggatcattgtctgtaatatgacgttcgactttccaaccatactgaagttggatgtcaccagctcttttactgtaacgtaaatcgatacgatcaccactttcacgaataacgtatttagcacccggatgctcatttggaccattacgaactagttgagtcaaccggtcaatattgtaaggtgtgacgacttctgggtatgttaaagttttggcaatagattttgggacaccaacttggtccaagtctaagttaggatcacctgaaatcactgtacgggcagagaaatcaacacgtttacccattaaattacctctaatacgaccttctttaccttttaaacgggcacgaatggatttaataggacgaccggatttttggacagcttgtggttgaccagcaatatcattgtccatgtaagttgctacatggaactgcaacaaagactccgattcttggataacgtgttgaggggaaccattgatttcaagtttctgaacgttaatatttgccttcaagatatctcctaatttgtatgttaaatcatcctcacctctttgtgattcgttgaaagaaatcgatggacgaacaggtggaggtggaactggcaagacggtcaaaatcatccattcagggcgagagaaatcttcattgaatcccaatctccaaccatcttctggtgagatgtgcttgaacacgttaagaatttcttcagcagatattattcgcttttctggttgatctgagtcgtcagcatttttatctttcttccatgtacctactaaactcaaaccatccttacgaatgcttggttgaatgtgaccacagcctcctctcgagaggaacactgttggatcatcaggagatggaacttctgtttcacaaaccatcttagctttgcacagagtccacacggcgttgaaccttctctttggatcctttatcttaatagcttgtctcatctgttcattatattcatcaaggagtaatttaccacaatgcatacagacagactcgcagaccttcttgattttcgagaggaaaccaatgtgaaacacaggcttggcaagttcgatatgtccaaagtgacctggacattcggccataccttcaccacaagtttgacatttgtagttacgatctatagatcctagtcttgggtcattaagtccaccaatcttagctttcatttgactctcatccattgtttctgggaactcgattttagccactgaaatgccacgaacttcttcaggtgagaaaagaccaaactggacttcttttatggtacgaagaggagcactagaataaggaaaatcgaccatcttttacgtttaataggatgcttttttggtggagttttttttgttttttgatatggattaatgtttattatgttagaataagctggaaaatagatgtgttgatgatttttgtaaatataatacaatcccttcaaaataatgtttgaacaatatgatggacttttcctacagtttcttggccgaagtaacaagtggtgggataaaaggagccaagcagtgggttatgtctcttgttgttttctgttgttagtcaaatataattcttgaaggaaaaataaatgaataaaaatgcaaatgggtaaaggaaagctgtaattcgaaatctgtttattgttttgtagatagcacagttcgctcaatcccttgaatacctctatttttttggtagtttttttctgttagtttgcaagtgcaataagcgcttcaaaggaaattcgttacttgtttcaaaggttgattcccaaaaataccttaaatccaagataggagtgcaggcttatcggatcacgattaaagcagcaggcttgcaatttccgcaaagttatgaaactccttaaatgtagctcaatagattgctttcagatggtttatccacacgattgatagaaaacactaacaatcttcaaatatgctgtttatttaacgtaacgtaacgcactgaaacgacaaagaagtagctaatgtggtagccaaaagatcctagaggggtacagagtttggtgtttggagtggggaggtccaaaatgccggtgtatgagcggtgacttttctccttgaatgagctgttgcatgtcaagcattgtttttggccattgttttctttattctttgccacttgaacaaagttgaaaatttttggatgtcgtttagtacgcaatacgtatgaaatgatagggatctgctatgcattcgagaatagcggaacgtacttatgtccgtcatcgcaagaagcatactatttaactgatggttaattacttgaatatttccatctgattttactttgataggtgataaggattttgaataagatgtgaggaaatatatagtcagtactaagacacgtatccattttattttgttttataagaggaatcgaaattaggaaaacattttggataatgacttcttctgtttagcaatcaactcctttttggctttcttggcgtcttgtaaagcctttataattgcagtatcatgtggttggtatgtagtagccaattcgaggtctgtcacggccatttctgcgttttttgtgtagtaataagctaaaccacggcgatacaatgccttggccttggatttatcgtctgtgttgtcagcatgaagggcttcagtggcggcgctaagtgttctactgtaatttttactcttgagagacaccaaagcgatgttcaagaataaggatacccttaatgcgtcaatttttttaacatcctcctctggtaaatcttgagggaagtactgcttaagcatttgactacttttttcatatttcacaagggctacttcaaaatttttctccttgaattgtttagtaccgatctcttttactgcttctacagcgttcaagacactattgacgtcgttgggatcaaccttcgaatcgtctgttatattttcttcataattgtcaccatacgcatcagtcggagtcgcttctgcatctgcaggaacagtataatcggatggtaacacaccacaatcctcaattttaacctctttggccggcttatcagcttcatctgtagcattattttctatagttctgactaaccttttgccctggatcacttcaccgaaaacaacatgcttaccatctaagtgtggagttggaacgcatgttatgaaacattgagatccattggtattcgcaccagcgtttgccatagacaacaagaatggcttatcatgcttcaaagtaaaattctcatcttcaaatttctctccgtaaatcgattcaccaccagtgccgttgaagttagtgaaatctccaaattgacacatgaaagacttgataactctgtggaagatcgagcccttgtagctcaatggtatatccggtttggatttggcaaatcccgagttaccttcacagagttttaagaaattctccgccgtctttggaacaacatcagaatacaactcgaaaacaatccgaccagcaggtttgcccccaatcgaaatatcgaaaaatgtcttaggtcttgtttcactcatattcaaattcaatgagctaactcgtatgtgtacttttttctccacgtaggtagaaataatgcagggttagtttgcttcttcaaaataacaaccgctttgccgtaacctacctttaagatcaatgatacaagctgggtttgtcaagagaggttactaatggactttactcaatttatacttctttttcagccgttctcattgtacttttgttgtggttttttcaaggctagatcgataaaagatggaaagcttcgaatttgctagaaaacctttaaaaatatatcaatacatgaacgaaccgtaaacacagtgataaatgaatatctgaagcgcctgaactaattactttcaggattaggtcttaacttcttcatataaacttcattactgttatctgcttcagagccagatccctcatctaaaccatcggcttcgagaccagattcagactcggaccctgtttctgaatcgttagtttcgtgatcttgccaaaccgatgaattatatgatgagtctttaatatccataatgtcattcagaacacttttataagacactgaaccaccatctggtagcgaactatgtagaactgatttttcgttgctcaagtttcgtaaatggccattatcttctatgacttctccagtttgtaaatctattacatcaccttgattatctatactttcatatttttgtatgatctgggaccatacgcgtttcatattctcgtctgctttcttatgacgctccataacctcttcgtctgacaatttaggaattaatcgattctctttagacatgatgtaaaccacaccatctcgagtaatttgttttagattctcttctttctttggctcctcttcgcctagcaaatcccttaatgcacctgtcaatcttcgaagattagccttcttcttactatttgatggtcttttaatcatcaataaagcactattgctgtaattctacttggaaacttcacctatggtccgggaactggttaaatttcgttatgttctggtgtaaatgttgtattgaaacgattattcattatccttaactaaaatatgtcaatttaaatgttgcgctgcgtagactaaaaatattcagatgggtattcgcatatacaattaaatgggtctatatacaatatgtggagtatttcgacaaagcttcacagtgaaggatctttttacacctgtaaatgcaaatctcaatgttcttttgcatcgactgtccccactctctggtcattacccttggattgccaacaatctttgaacagtttcatttcaccaagacactgtctccaatcattagtctctgcatggcaaagttgtaaagctagattctctacgtaacagcctgtgttcgatattctcttgtcccaggcatcaggatcttctttatccatatcctgatactccgctaatgcttccttgtagtattttgattctcctgcagacataattgaaagtatgaagctacgacagaataattgctattgactcggtcaacgtatcactgtagactgtgatagtcgtttcaagattaactgttgcatgtactattgcacttattgtattgtattctactaaattaaccatttatacttcagtgtttttacttttccaattaaaccttgctctcgattgttctttatggccactgaactaattttccgttccaaaagcttgattgagctacaaaaggtttaatgactattaatataagaaaagaaagctgtgttaaaaaacgtcagagatccccaaactgcaatacaacactattgatctatgtaataaacgaccaggctgcggtttgcgttggcgtaattgcaccgggagatcacgtgatataaatgctttcaagattatgcaatctccaggcacacaacatattcagtacttagtgcgggatacctactataaactcaataattgtacagtaacataggtagtaagatcccttttcgagtatacattgtccatgttgttgtccctttggatggtgtctcgcctaattttgggccagatctcgactgcaaaaaaataatttgctgaagtttttataaatgatgggaactgaagaaaccaaagaaattgaagattcaaaatatgtaaaccgaattttaggaaaacaacagcttgttctgatctttttcagaagaataaaaggtggctaaacagtgttacacgtagcattgagtttgcgcatcaatattagctaatacccgtgtgataacttgaagcaatggtgaagctagctgagtatccgcgtacggctacgttttcatggtctcacgatagggtgccagttttggcgactggtcctgcatctggagccattgatgctgatttttcaagtacttcgacattagaactatggtcgctattgtcttttgatgggtctaaacctagtggatctgttgtcgctgacggtaagttcaacgatttggattggtcgggcgatgacaaaataattgctggtgccttagaaaatggtgttgttgagtttttcgatccaaaagccttgaaatctgttgctaagatccataaacatcagggtcctgtcaagacattgaagttcaatgccaaacagaacaatgttcttgtctctggtggcactcaaggtgaaatctttgtttgggattcaaacaagatcggatcttcagattattctcctttttcggctggtatcagtaatactccaatcgatgaagtttcctcgttgtcatggaaccaatcgttggcacatgtgtttgcatcagccagttcttcagggtatgcatctgtgtgggatttaaaggcaaagaaacaagttttgcatttgaaccacagttcctctaccactggtattaaggtcccattgacggttgttgactggcatccaaccagctctaccattattgcaaccgcctctagctcagatacagaacctcttgtcctaacgtgggatctaagaaatgctcatgtaccattgaaagtgctatcacaaggacattcaaagggtgttttatcgttggattggtgcaaacaagatgaaaatctattgttatccagtggtcgtgataacacttcggtgttatggaatccgcaagaaggctccatcttaactcagttcgctccacgtggtaactgggtctttaaatccaaatttgctcctgaagctccagatttatttgcatccgcatcctttgatagtaagatcgtcgttcaaacgttgcaaaatttgagcaataccttggatgctcaggcaaatgagagtaagcaacatgcttctgaggatgaattctggaacaatgtaacctccaactcagttgatgacaaacctaacactgtcaagatccaagccccaaaatggtacggcaacaaatctcctgccgctcaatgggcattcggtggtaagctggttagaatatccgatgatggtaaaggtgtcagtgtagtaaaaccttgtatttctggactggaaaagaatcagcttttcgatgagtccttgaaatccaaggacttcgtgaaattgatcaataagagattatcacaaaagatcaacgcaacaaacgaagatgactggaatttactagagaatctatctatggatggaactgcactttacttgaaagatgcattatcattagatgatgccaaagaagacatcatcaaaaagtcagaagaagatggtgctgacttcttcaaccaactaaacgacaaattcgttcccgaaggcgctttcaagcttgatttttctgaatcaatgaaaccactcactaactttttgatcaaaggtgatttgaaatctgctttaaatcaggctttagagaaggacttgttattagaggctttggtgatcgctattacttccaatgatgccttgttggcggataaagcgaagaacgcctacttttccaagcattctgagcaatctgggttggcaagaactttattctctgttgctcaacgcgatgttgaagatattgttacaaacatcgatgtttctcaatggaaagatgctgttcagttcattttcaactacaccaaggaagatatctcaaagaaaaattcacttttagtaaaattaggtgatagattactacacgagggaaacagaaaagatgctattttattatatttgagcggccagtccttggaaagcattgcgtcaatttggctgaaagaattccctgaacttgaaaatcaattgacgtctcaaaaggacaccttatacgaggcccatctggaatgtttaactgaatttgtggaaaggttcaccgtgttatctgactaccttgacaaaggtactgttaaattaactaatcaaacgctaatctcaaagtttttggaattcgtcaatgtcacagctgccaatggcgatttcgagctttcattaagatttttggaaactttaccggacgataacgaagaggttaaaagtgaaaagcaacgtgtgctgattgcctccggtaaaacaagtactactaggtcaacagaaaggacagcaaacagtaccctacaatccagacaaggaagatacggttcaacttccgtaccaactgccaatggtgcgcctcgtttatcaaactctggaattcctcccccaaatcctttggctgctcctcatcagcctcctgcctcaactgctccaaatgtcgtcccaagaaagccaagcttcgttccacagacaacttctgcaattccaacacccaatccatatgctccggctgcggtaaatcagcaaattcctctatctgttgtgggttccagaccatcttacacgccaccagtgaacccatatgcacaaactgctacaagtatcccacctaacccatatgccccactacctgtggcagcgcctgtaccacttggctctccagtcgctccgccaccaatttccggtgctagtggatattctggtcaaacgcctcatctacatgataaaccaatcgacggttggaatgatctcccatcagtaagcaaagaaaaaccaacccgtgccaaggctgtcaacacagctccaattggcatgtcaactccatcgtatggtacccccgatcttgcagcggttccactttcgagagcatctacaaactcaacgctcccaccaccaccgcctaatgtgagaagaacaccaaagcttacttccccacccgaagttgcatctcctccgctaccattaaaaaagacgaactcttatgcgcctactgtcagcgctgtacaatcttctcaaatgccacagcaaatatcaaatcctttaatgcctccagcttctccaaacccggctacaaacggaaggtcttttgttcctcctgtaaatccttacagtcctgctccatctgcagtcacgcccacagggattgtgccaccaaaagctttagtagctgctataccatctccggtaccagctcctaaagctgcagccgtccctccaccaaggaaaatgaataggaaaagtactgccgttggtgatgcaagcgcagcaagcaatcttctaagctcaattcagaccaaacctacccctccaattcacagtccagctatggtagatccggtagctgtacaatacgatcaatctgcagtgtcacctacaaatgtcgaaattgcagcggaacagggtgctggtatcaccgagagtgacaggcctattgttgagtttttaactgcagagctacaacgagtgacacctttaattccacaagaatacactaaacaattgaaggactgtgacaaaagaatcaagattttaattaaacatttggaacaccacgacttgttaacccaaccaacgattgacaaattgcatcagatcgttgctttctggaaggaaggaaactactctgaggcgatgactattcatcaagatttgtcagcaaaccatagctctgaggcaggaaactggttgactggtatcaagagattaatgaacattgccgaagctacctcttctcaatagtttttgttggacaacaacaacaacattatgcctccatcagatatcattgtttctttattgactagtttatttaatggtccatcgcattcttcacgataacatccattgttttgagaaaatcggccaatttgtacaaaacacattatatagcacgacatctagctcaataattaggatgtgtacatactgatttcttcttatctttattctctagcatgtgtgattaacacattgattcgctttatgcgaagtgccaaaaaatcaaaaaaatcaaaaaagcgatggctgaacaattgttgaacatgagataataaccagtagacataattagttatatagtttcctggaagggtattgccagttagaaagtccacttaccataatattgaacgtcgttttgtcgacctttgcatactatctgagtattgttcacccaagcattttctttttgttgattatagtcgaagattttacagtccaaaactctctcaaatcccttgagcaattgatatataacattgaccaacatctgagaggaaatcaaaaagatagcccgtctgataataacaaccatcacatatcacttcaatcgcatttaacttgacaaaaagctaagtttaccagtactatttgcaagtacctagagacccaaactattatgactacggctcaacgatcactatgactactgattctgttccacgaaagaatatttctcaagctatcaaactagtgtttcttcgacggaaagcacaagagcgtaacgaggcaggctcctctgaagtaccgacgggtggtaaatcgaataatgcttccgctacatcgtcacccgaagaggcacttgagaatagtggagaaaacttcgaactcacaaatttcgcatctttatcagaaatggaatcagaaatctttcttgcacctcccgccaaacaatcgaagaagatctccattcttgttggtatgtttgttgctgtgggtggatttttgtttgggtatgatacaggattaataaataatatcagcgaaatgccttatgttaaccaaaagtttgcacctaacaagaatcatttcacaacaccacaaatctcgatattagtgtcttttttatccttggggacgttcattggagccttactggcacctttaatctccgactcttatggtcgaaagactacaatgatctttagtacgttcgtggtatttatgataggaaactctttacaggtggcagctggttctatgaccatacttgtagttggaagagtcctctctggtatgagtgttggactaatatcggctgcggtgccattatatcaaagtgaagctgcacagaaatctgttcgtggtgcaattatttcctgttaccagtgggccattacatgggggctacttgtagcaagtgcagtttcccaaggaacatataaaagaatggatgcatctagttaccaaataccgatcggattacagtatatttggtcctttctactcggtgtcggcattcttttcctccctgaaagcccaagatactatgttttcaaagataggctagacaaagcggcaaaatctttatcctttttacgtggcgtaccagaggatgactccggattacttgaagagttggttgagatcaaagcaacatatgattacgagatgtcattcggaaaaatctcttacctagattgtttcagatcaacgagatcaagaaccaaacagcgtctacgaatgttgaccggtatcgctcttcaggcttttcagcaagtgagtggtatcaattttatcttttattatggcgtagactttttcaataagagtggtgtcagcgaaagctatttggtttccttcgtcacatatgcagtaaatgttgcgtttaacattccggggttattcttggtcgaatatatcggacgaagaaaattgttattgatgggtggtattcttatgactatctccaatttcattattgctatagtcggattagcgactgactccatggttgcgaacaaagtgatgattgcattcatctgtttattcattgcatcattttcggccacctggggtggtggtgtgtgggtaatttccgctgaattatatccattgggtgttcgcgctaaatgcaccgccatctgtgcagcatcaaactggctaataaatttcatctgtgcattaataacgccttacattatgcacatagatagcagtgtcagacaaacgagtatcggtaccaaaatcttctttgtttgggggtcattgaacgctgttggggttcttgttgtgtacttcaccgtgtacgaaacgaatggattatcattggaagagatcgatgagttgtacaagaaatcttcttctggaataaactccatagaatggaacaagaagatcaaagcctttccagatttgtttcaaaggacaagaccgaacaatgaaggtgacggagaagctgatgataacatacatacagatgaaaattataaccatactatttccagctataatggaacccaaaacaatgaaaaatatcctattcaagtacagatgccacaatttggtgtacggaacatcgaatttttgaacaccacaggctcatctccgcaatcggatatgacagaacccaactttgtcgacttgggtaatggtcttggtataacaacgtatcaaagaggcccaccatccgtccttactgactcgagtgaagaagaggaagagggacaacaacaagagacagatgagactgaggaaggtaaatcattcaaacaccagtacactgacgctcgtaataaaaatcgtggcgagcgcggcagtttcaatagcaatagttcaacctcaggcactactcgatcttcttcccacaaggccagtgttcaaaggatggaagaaattaatctgtacatggcccaattaatgcatcgcggaggaacagaagatctttcgcgtaacactaccgataacactcatcaaccgatatcacatgatatcatgagtcaatggaactcctcatcccaaaataaaggacctagcactcaaaccgatattaatagtaacacttaggaacactaactaatcttataatagtactttaatatataatttattacatgttgaatgacgcttaccggaaggagtatgtaaaatcttacttttatcttagccgttagaaagtgtaaatgcttgaactcaaacaattcagaatcaagtagagttcatgtatcatgctgaaaaactgagtcgcagctacacatgttagcgtgaatgctacttattatgcgaagatgtttcaactttgatagcgggatgatgtctcgaataaggaaaacaaaaaaaactagaattaatagttaaggattcagtataaaaaggacacgggatggaaaatagttgaaacaaacttttgggaaagcgcggaagtgaagaacaacggtcgaaccccaagattggtgatacgaatatacaccaccgtgcgaggttgtaaggttgcttaacgttaataaaaggagggataaggagtgaaaacagttacgagttttatatatttattcatttctgtctggcaacattgaaggaacaaaaaagagactatcagaaccgctaagtgtctattatagagctaccccatccaagatgtcaactgagagtgatttaaagtctcgagttccacctgctaccaaaactccattggatgtgtcagtttctgggttgaagaaaacagtgacacaagttatgaacacggatgttgatgatgtgttgaaacgtaaaaatattaatacaaaccaaaagttcagcgggaagatagaatatgccatatacaagacgcttttgatatttctctacgtgatatatgctatcactagatatttccaacgtgaatacaatagaattgccatcaaactgttggacttggcgtataatccttcgaattcaccacagttgatcaggcaggacgtgaataaattacagaagatccctaaaaggctagcggcaatcttagaatcaaaacccgagggtgacataggtggaggtctaccgggactcatcaacgacgcgagtgacgtggtatgctggaccgtttctgccggaattaagcatttaatactgtacgattacgacggtaagatgaaacagaacgtgcatgaactaagagccggcatccatcataaactagcgaagtattttggtctggataatgtacccaagttcgcaatcaagataccgcatacaaaccaaatctttttcgacaaagacgaggatcagaaggatttatcgcctgaaaagtcaacgacaaaacataaggtggccgttgaaatttctttactatccaaagttgatggtagagacacgatccttgaattgaccaagacaatggccgatctatgtgccaagggccaattgaaggtggaagacgttgatacgaaattagtcaaccaagaactaacacagctcgtaggacatgaacccgatttacttctatttttcggtcctgcattggatttacaaggattcccaccatggcatatcagattaacagaattatactgggaaactgacaacgatcaagtttcatactacgttttcatcagaggtctcaaacagtatgccgattgcaagatgaacgtcggcaagtgaaacaaactgtacaacatcatgatatattgctaaccagataataaataggtcataaccctctagctacataatgtatacgctcatcagactaataaaagaaaaaaagacgaaacgatattgctggttgccaactctcacgtcaggtcgttcaatatcgttgttaccatgaaatgacaatcccaatacagttaccctactttgacacgtagagcctaatttttttttttcccgtcccatttggaaaaagcatatataaaaaatagcaagagcattgataaggttaccattttgtttagatctaattatatacttagcccacattgaaagggagcagaagcctcagcgataaggaagtatgtttcccagcgcgtaacgtttggtatcaaggtaccggcgagcaacgaatttggacgttcaaacttggtggaattgcaattgtaacacgaattacacgcgataaacgcgtttccgatctgtgcgaattgggtgttcctcagtaaaccttgccgcaattatttaccatttgtcaattttcaagtttttcatcctatattctctgtttgtctgagaatattttattgggagggaaaagaaaaaaaacatttgtgcgggtgtttctgggttatatccactgaagaaaaaaaaaagacagtaaatcgcctcaattagttaccaccgatagacgagaagacgaaaattagtatgggaggtaaagtatcaccggatcttggcttggctaagactcatgtcctaaggaattggagtttgtttgtgtgtctctatcatgtttgattttttgtttatggatgtttttctttctctctctcttgtctccttttttttcctgatttgaatctatttttttttcagttctatgttcaattgttttcccactataataagacgttccatttattctctgatcgtttttactaactgaatttctgaattcttctccttgcgactgagtttcggtattaccttaattctatcgattacagttgggattaaatttgttttctttaatttataggaaaccaagaacttcataattctaaaaagcagtacaagatgggtgtttcgttttctaagttgttcagcaacttgttcggtcataaagaaatgagaatcttgatggttggtcttgatggtgctggtaagaccactgttttatataagttgaaattgggtgaagttgtcactacaattccaactattggtttcaacgttgagactgttgaatacaagaacatctcattcactgtttgggatgtcggtggacaagataagatcagaccattatggagacattactttagaaacactgaaggtatcatcttcgttgttgactctaacgatagagctcgtattgctgaagctagagaagtcctacaaagaatgttgaacgaagacgaaatcagaaacgctgttctattggtcttcgctaacaaacaggatttgccagaagccatgccagctgccgaaatcaccgaaaagttgggcttacactccatcagacaacgtccatggtacattcaagctacttgtgctacttctggtgaaggtttgtacgaaggtttggaatggttgagtactactttgaagaaccaatcttaaatgggggttttaatgaaatgaatcaataaaattaaaattacaacaacaacaacaacaacagcaacctatttacaaattatcaatatccaataacaaaaaaagaaactgaaattattagaatattcaggaatatagataattccaacagatatatccgttattaattttttttttgttccttcttctctttcttacttttatttcatctcctcctataatattgtcaaggttatacctctattctgaaccagcatgccatatatttccattacgaacgaattataagaaaaaaaaacctacacagaaacattgcaagagggtaggaatgacagataacgaaacgagactcgaaattaattaaaccacaaactcaatttccttcggatatcagttcaaaaaaccctcgatttttgcatcgagatcattgaatgaaaagaacataataaacatactcgggaaccgcatcaaattcttcattcgtaccagtgacaatgacaacatatctacatgaaaactgaagcgaaaataaagggatttcgaataagaattatcaataaaatatctttaatcatgcacattagtggataacactgattgatcatcctcttttctgattttggtccccttattgtttattatcttctgcttctcgtcattttctgtttatcttacaatatcgttatatcatatatatactttaggtttatccaatgtactatcgaaatctacaaagcacgtgaattcgtcctaaccgtaaattttattcacattgattcaaacacaagcatcgtttttaacaattcgtacgcattcattcgttaccatgaacaactttttaacaattgcactcttaaacgatatccaatgttcacgaagacactgctcgaacttgcctttttttaattgagattataacacgtgacagtacatcggttgtttcctaggactgtttgtaacacccatacattataacgattcatttgaaataaaacaacacccagacatcacacgagacatctgcaatccgaccggacaaaactatatatatttcccaaaatagaaagaaagctcacttcctcctgggatttttctttcttttctagttttccttttacagtaatttctagctttttcctgttctgagcttcgatgatgattttgaaattctcactggaccgactctttcaataggatttgatgtatccaatttcaaagctatctagtgttatagagctatcatattagatattacctgtctcttattagcttggataagaggaaaccacagtaagacaacattcgagatggtatgtgcaagtgagtcgtatggagcgtgtgaacgaactgcaagaaatagagcatataacgaagaaaatggatgacttttgagaatgcatggatagatagcctacaaacaatatttgagcaaaccgttcggcgaggaaactcttcaacattatcggtattgtaatgcacaagtcaataaccaaatttgtggcaagatagatggtctaacgacagttatttttcgatggacgtataggaaacgtttgacatctagagtgtagaggagaaagacaagaacaactatgataacaggcttaagataccataatttccttttgaatttggaaacctgaattaaaagcttctgcggaacacctttcgttgaatattctatcctgcatatttatgctcttctacatctcctaaggagatgtccgaaataattggactgcagttctgaaacaggacaactatatgagtagtgtggtattggttttaatatgaacaatttttactaacaatagacatcatttcgatggcatttttatttaggccggtattaaagcttacgaattgagaaccaagtccaaggaccaattggaacaacaattggttgaattgaagaaggaattggccgaattgaaggttcaaaaattgtccagaccatctttgccaaaaatcaacactgtcagaaagaacattgctcgtgtcttgactgttatctctcaaaaccaaagacaagctgtcagagaattgtacaagggtaagaagtaccaaccaaaggacttgagagccaagaagaccagagctttgagaagagctttgaccaaattcgaagcttcccaagttactgaaaagcaaagaaagaagcaaattgctttcccacaaagaaagtatgctatcaaggcttaagaaaccgttcttcctattacattattaagaacgttttttcatgttaaattagtttacatctttctacataatctctaacatcattgttgtatttgagtacacgcattttgcaaaatagacacagggtttctgtttaatctcatgttagaatgatcctctgcatggaatcgaacgccacttgctgtgtcactttaagattatattgacgaaattttttacctacatacttattttagtggggtatgctattctttcttcgaacgcttagattttctgaattccaagattttctccttcaactccacgttgggtataacctcctcaagtttcaatggtgatctgttgaaggggtctgttgagtcgcttagcaaatgtgctttaatggtgcttctatcaatggtaactttggaagtagggagaatgactgggtctttcatgatagtatacattaaaggatccaagaattcttctggagcatctcccatttccaagtcttcttcttcctccaggagtctagttttttcagcggagtcggcaaaatatatcaacttgtggcacatttcctcagaaaataggccagttttcactgagaggatatgtacagccttcttaaacaactctttattgaaggaacggccatctctagcaactgcagcaatgaattcttgttcatcagctaaattgatgtaaattgtagccaatgtctgtaacaaagtcttgggattgaattgatatttcgatggatccttgacttttaattcacgacacttggagcctactaacgactccaaattgtagtctagcatcgcagccaatctgtctacaatttccggtgtggaaaaagcttttggaatatgcttcgtgaaaatattgaacaacactaacgacttttccgacaatccgcatgacgacttggcttgtctttcagcggatttgagacgattttgtagctcttgggtttcttcttcccgacttggcggcaaaccctttgcccgattttctaactctagctgtatattatggacatcagcaagtgtagtaagaccttcatccaacaagaatgtcaaatcattcaacattcttgctacaaatctaacaaagaaatcagaattattttgtgattgccacagtaattgattgcggtagtgaggaatctcgtacaaagcttcaagaattattgagatactgtaacgggcattaaatttatcgtaaaactgtgatgaagaacctgtcttttcaacaataacataaaagtccaataagccatacaacaagtttttcaacacaatatcgttatgctcaaagatttccatcatgaaacctggagaattatcactcattggcatagctccgatacttaacacttgaaccattttacccttcaaatgaggattcgatattaattcaggacagcgtaaaatcatcgttgccaattcaatgtaagaatggagtcttgggtttctgaatagtggattttgcacatattttgtcacgtactggcaatagttgattgaaccttcgatgacaaattctggataatatttaaagggaactggggcgtttttcctcaaatactccgcgttatcgacattttcaactcctatttgatcaggtattagaggcaagtctatcgttttgaaaggatattggtgatacgggtcgataacacgcatcaagaaagtacttgctccggctatgaaatcaaagacctctaggtgcacagttttattactgaaaaatccttggcaagaagatctgaccgatgagagatggtgatatcttttctctaattgcttcaattgaatttctccaaatctggccatcatgctgttttgtgaattattaataacttgtcttaaatgagtcaaatgttcttttagttttgtgacttctggagcatatctctcatcaaatagtatagtaccaccaataccataatgcaagtacgtcaaagtcaaaaagaaacaatgcgaaataaaatttggctcctcttcatttgttttcttattctgatcataaaattcgtccgcctctttggcatccgagttcattcttgtttcctggttcaagtcaatgtaaagattcaaattgttgaaataattaacgtcaattttgtcaatcttcttgtaagatacatcgaggaacggcaaggaaaatttaattaacattaaagttatatttgtcataaaggagttggaagctaatttgttaacttgtgcatgatcacctctacgaagatggttcttattcacaatctgtcctagataggataaaagatctgacctcgattccggtgatgctctaatgattttatccacaatatagaataatctttgtagaaccacgttatgttccgtgtgcaaagaagtgtgaatcatgtttatctgttgctgattttgagaatcagggtcaacataatttttcaatgcgactgcagtctgaagtggcgagagggaaagtatgggacccaacaaagtcactttctcgtattgattagcagcggtagaatagtcagcaaagaatccggtcaatttggtaaatatggttgccactggtttgaacgatacaaatagctcgaaaagagtcaagactttattgtataacgtagagttgttcaaatcgaatccttctgttgcatcgaccttaccaatataaacttgcacagtctgaaaaaagttatcaacaaaatcaaaagcagttccctcctggattgatctattgatcattgcagttaacaaatctgtgaacttatccaaatcttgtaatatatcagaaatatactgttggaaagagcccttaattgcaaattcttcgatctggaaacaaactaaagcataacccacgataagcctatcaatctcttgtaaggtaatagtttgctgttcatccagattctttttcgatatacgtttggattgctgacaacgctggaaacatgagtttaaatatttcaacggctgttcttgtaacgactcattttcggtcaattgatacaaaacaatgggatcaacacagtctgcactaaggtcagatacatcttctatatctccaacataagtgcaccctttggaatcattcgggtcaagggtcaccataaaaatgtctctcattaacgtcattctgataaatcaaactgaatcaaaatgaaaccctaggacctgatgaatactttcactatacctaacagcacgcttttcgtgtaatagacgagcgttataccaaatttataaaatttggtcttatagacttgattttcgccgtctactccactagattccctatgagtattttcgttaatagcatattgattaattgataagtgtatatttagataactttatatcagtaatttctccgtcttagtaaaccgcttgtatcagcgtatttttcggcccccgaaaattaaatttctggggtccgaataaatctgtctcaattggttccgacaggaatgcacccttcttcaccagaaacgctgcgtggtactggattgtgaaggaatcgatcccacgtcgacttaatcactacattgcctccatccaaaagacggggtatcctctctgtttcaattgaataatgcacctttcttacgcagtgtcagttaacatctgttccttcttttatgattcgcaattgcaacacgcgcatgcatacttcaccattggcacatgacgagcagtattatttaaatacacaactatttcaactaaattttgattcattcgttgccatatcaaaaatatcaagtttgttttcccttatccatagatcatatctaacagaaacaaggttcatctttcacacttcttacatagatacaacggagtacaattcagtaaaaattactgaacgccattatttcaagaattgactgcatcattactagtctgagtaacatcacatatagaaatcttcaacacctttttttgtaggtttatcctaaatcccttcctctatttgtctcatactctggccaaatttttttcccttcgttcctaccttactttcaagaagctaatattaggtattggtatttcggaacaaaatagattaaagatctacaagatatacagccattggttgaagttaacgaggggtattctgccaacaacgtaattgaattatcaccactgagtgactctaccgatagtgtaccatataacgactttttggaaagaggattgtaacatggaagagcttaaagttacgccggcattgctgatagcgttgtttcaaaaacctcaggatcgagtgtttttgattgatctggagaatagcgttctagattttgttgaatcctcagcttatacttatcaattgaaaccaatgaactcttattatagattactgtcgcatcaagtagcagaataccatggtttgcaacatacagtttcgaaggacaatgataaatgtgtgatcgtctataaacagaatgactatgaaccaaatgcaaatctgatccttctccaggaattggaaccacaggtcatgtaccagtttccaccagagtattacgcccttgcttcgatggcagcagctaataatcagcaacaattgatacacaagacaataagacaaaagccaagacagagtagtcagcatcatacgccagtgtcagctcctgaacacgtatcggataatcaaacaaccagagacaatgcacaggttactgatgataaaagtgctgaaggggtttcacctgcagcagcagctcttcgtatgtctatcaagaaaaaagtgaagatacttaaacgggaggtggaaacagatagcggacaatcgagggatttaagccacgaagcaactacttcaacatcaatagaaaacactttggaagaagaaaagggtgcagggtcaaataaagattcgacggtcatagatttagaggaacagagaagaataaaagaacaacagtataatgaagaaaaagagaagatcttctctggttctccatcgtccctcaccccagtttccaccccacctgcgacacctgtaacactgaattctgcaagtggatcgaatggggaagcagatgattctcctcagcctcatcagttcgagacttccagatttaatctaaaccatcaaaacgaaatgaaatatatgaagaaaacacaataccagcataacaacaagagacagaactcacacaataacaggtataacaagccattgaatagacagcctgttatgcatccatattatggagtgccacctccgatggcaccaatgagaccagattctattccgttcggatatcagatggtagcgccaatggagtatatgtactaccctataggagctccaatgactaacaatcgaatgatgataccaggacaaccaatgtatgccatgccaccaccagtatttcaaccttatgagaaaaagaacagtggtaaaaatgactctaatggatacaaaaagaatggaaaacccataaatgaagcacgtcattttcgttgctgaagcaaataaaagttagatctaatcatagacgtatataatgcgattacaaacataatggtttttacttgttcatattgaaatgtttcagcttttagagaacgccagctacgttgttcagaagatgggcccgggcaatgactagcctggacatgaacattacttcgtcactaaagattcatccacaatcaatgtctgatcaatggcgaaaatattgtcacagcttagagtatgtatcataaatcatcaccttttcacaatttcaacaccccaattcaaagtcaaatggttgttcttatcatcatctatgaactttgagactgcagaataattcccgcgaacaaggaaaccacttggcgcttcagattcaggcaattccacctcataaaatgggttctttgtggtatttggagcatacgaacccaagtggtcatcaatcttatcaactgcaatgcctgcctttttggtgtattgcacgtatcttaagccagtaataatttcgtgttgaaccttgaaagtgatcttcaaatggtaaatagatttttctttgatcttgtatctctttgaggccaggtctttcaaagtcttctcgtttgtcaaatcaaacgtaattggcgctggttctgtgtcaacgatcaactgaatcttctggatcaccacacgacgttcatccccaggatgttccaatggtaaaacatcacctcccaatcctaaagaatctttccattttcttaacgcctcatcatcagcatctaagtttttgtattcttctacagtcttcttctccccgactttgtatgtatcgttttcttcatcgaattgtttaaactcctcttcttcagacatggctagaaacggtcacggcaactcacgaatgatatcactgagagtggatccaatgtttgattaaaaagatttaaagtataaagcgagaactttaatggcgttggatcaactctaacgcccaagctatcaaattgccaatattttgcatgtgttcttacacagtgtcaaagtccgctcgagatctgatgtcgttagttaagaaacctcaaatagttgcacttcgagactcgacacgcatcagtgaaaagaacgaagtaaaaataggaaaaccattgacagcacgtgacttgaaaatcacggggatctccgcacgtctaatcacttcacactcgcccttaatgatacatggaaatcctatcacaattcacatcacaactgatcaaacacagtatatatatatatagatatattaataaagaaacatgtttgtatgctagttcattcgacagctttatcctgacatttccgattacgtgaagagcctaatcgaataaactggtttcaacgaagagcgtatcaacgttacctgcaaatatgacaagattgcccagtatcgatgaattcaaaagctcatcacttaatgaacaaattgatattctagacgtattgtttgaacacagtgattctttagtatggttcactctccaaaattctcgattcatggctagtggatggaattcttacgtggaactcgtcaacgccattaaggataaattattgaaagtgtgcgacgatacagaggcagaaggaattagcagccgtggtgtagatcatctggctaacatagtgggtgctcatccaagactcggagattcaaaacagaaactgtctgtccattccatgaaagagcaagccaacttaactggtagcacagtcgattctttagaaattttgacatggttaaagactttgaatgacaagtacgaaaagaaatatgaggggttgaagtttgtagtctttgtaaatggcagatcttacgatagaattagtaaactgatggagcaaagaatcaattccaataatacgtggttcgaagagtgtaggatagccatcaacgagatgacagatatcgccattgacagacttaacaaatgcagtgaaattaagggcaagatataatattccaaaaacgaaaggtaaataataacacttgaagcaactatagtttttctgattcattgcgagggcagcgttacattctccaaatatatcatacttgccatgatatatataaacattttgtgccttctgatcgaaaaaaacccgaatcgatgtaattaatagtattgatgatatatatttattataacagacgttatgtattcagtgataccacattacgagcatttagatcatgtctccgtgtacgttccaaaaaatgatattgctagtgaggaacataggcgggatggcaacatttcgtagaatacctataacctatgaaacaatcttttcctgatagataagatcccagtgaattacaagaaataatccggagtctttctacttacggttggttcaccgggtcttacggatggattatactgtaagaactgtctattcatcgtatcgtcaacttccatgattgctgcttgattaccacatctataacagtagtttggagcgctgaatatggtaacaacactttgttgatgagaccaagcatatccttccataaccaattgatgtgctctcgcaatcaatgagagatcgtttgtatgattgaattgctcactaatgtcttgaccaaacgtgaaacctgcacctcttggacttataccccagccacctctatcatccgggtctgaccataatagatcacacattggaccttcatgaggaacctcttgtattctatttagttctctgacttgatcaaccgtttcgatcattggtgaaaggccaccatgtagacagaagatcttgttatccactagtgcggtaattgggaaataatcaaacaaatcagtaaacattttccaaacgttagcgctaccgtatttccttagacactcatcataaaacccgtacacttgtgtaatctgcctagactcatgattacctcttagaattgtaattctgcttgggtaacggacttttagtgcaaccaaatatgaaacagtctctacagaataataacctctatcgacataatcacccatgaacaagtaatttgtatcgggacaaggtccaccgatcttgaataattctatcaaatcgtggaattgtccatgaacgtcaccacatatcgtcacggggacggacacaggttgaacgttgtcctcaaattgaagcacatcaaccgccatcttacacaacttggcaacatcttcctccgacaaacattgacattgactcaacttttctaaccatgcatccaattgaccgatactagacccagtcagttccacgggtttcgtagccttattgtcagctattcctgacgtacctggagacgaactcgccaatccgttatcaaaacctggagcttcttcgtctaaagttgaatccagttgatcttctactgcgtcatgcataggcacatcagtatcaacatccattatgtaatgcagtaatgttttgaatgtgttaacccaactcttttattctagccgctggtatattagtaacaaataagggtttactccagtctatatgcacgctttgtcaaacgcctttgccaaacacttccaaatggtccgttctttcttcaattattatttataaccttcttttcctaatttctcaaaatattgggagaaagaaagtagggaaaaaaaattaaatcaacagagaacaacaacgcactcacagaggacgacgttgtattagataggacacaactgagttcaaattgttccggctcaaaaaatcacttggcctcagaagtggttgatataaatgaaagtttagtgagattctaccgttaactgaacctggtatcgctaacaatttcgtaaagagtacgtatactttgtatatacttttttcttcctatctttcttccttttttgtatggcattttttttgctcttccatactgtgtagggaagatcggaacacagatagttacagaacgggagatctggcgagagggcgatacttccatattacttaagcggccaattttagggtctcaaagacaagagcatcacgcacgactgtatcagttgaaagtaagctgtctgaaaacatcattgttttacttttacttccacagggaaggctgggttccctttgtagtatgtaatattcttccgttgaaggcggtagggtaactatatatcagttcctgtgtcacacagatgtcagcgattcttggatttagatataaactgaacatggctccttctgtggattcgagactgtatcattgaaatacatttcacttgttataagtgaacgattacgttcggtggtctttcaaatcccccaaaggttacaaacaatgacggagactttagatcttagcaatagtcggtgggtattcgatcaaagcctgttacaaggtgatgcgcaacatgcagaaaaatctcagggtcaaaacttgcaccattctgaaaaatctgttagggagttggttatttctaaacaacatactcgtgttttccctgtggataaccaattaatgggccggatggaggatcaattagttcgatggaaacgaccagcatcctcgcatcttggcacagtacaagtaatcgagggcactcatccataccaacaggaacctatttcaatgtcacaaacgtggtcccagataagagatgcattttcgacaagaatgcagagaaatagtatcaatgatacacaagaggatgaagaagaagatttagatgggcttgacttgggcaataccgaaatttggaattacaaagacaaagcatttactactgaacgtattgacacctaccgttccaacattatcgatgaatacaatgcaacaacgtcaatgactgcaaaagccgtacccgtaacgttgaaattaccagcaagaacagatgatatgacgataaatagtcagtacacgtatcactacccaattccacagtactacctaccacattcacaacaacagcaaaacaacaacaatgtaacaaactctagacaaatgacgcaggcttctcaagatgcatccttctcttgctccagttggttatgttttacttgagtgagattcgtataaaactgacgcgcgtcaaaaaaaaagacgaaccatgtgattaactttcatagacaatgaaacagtttagaaaactggaaaaaaacgcaagattaaaaagttcaaaggaatttaggctaatatttataatcagtaagtatcgatctcaggcacctttaaatacaattggtaacagatggcgattaatactaaaaagatcaaacggttcatattctttcaccttgttgtatttcaatttttcatcgttgacttttcaaattctgaaaagttaccctgatagaattgataaggggcaaactgtgctgataacactagtatgaaaaaagattgaaattaagaatttgaacttaaaaggaaaccattatatgaatgagcgcgtggtttgagtattgaaataaatcctgtagaacaacgttcattaactagttcatcgatactgaccttaagataataatatcctcggaacaattgacattgagatttgtacctaacattacgtgggtatcttcctctattatttttctttctttctttcttacagttaataacgttttcaattaagagtaattgattgattggttgattaattagctaatttaaagaagttattagggcgtgcaagtttagaactacagatatcaaaaatggcaggtgcattggaaaacgcacgtaaggaattgaaaagagtaacccttgaagaccatgaggagagtgaatatggtgctatttactctgtttctggtcctgtggtgattgcagaaaacatgattggatgtgccatgtacgaattggttaaagttggtcatgacaacttggtgggtgaagtcattcgtattgatggtgaaaaggctacaatccaagtgtatgaagaaactacaggtgttactgttggtgaccctgttttaagaactggtaaaccattatctgtcgaattgggtccaggtttgatggagacaatttatgatggtattcaaagaccattgaaggccattaaggatatctctcaatctatctatattccaagaggtattgatgctccagctttgagtagaactatcaaatggcaatttactcctggcaagttcaaagtaggcgaccatatctcaggtggtgatattttcggttccattttcgaaaactctcttttggatgaccacaagatcttgttgccaccaagagcaagaggtactgttacatggattgcttccgctggtgaatacaccgttgatgaaaagattctagaattggaatttgacggtgtcaaatacgattactccatgtatcacacatggccagtgcgtgttccaagacctgtcaccgaaaagctctctgctgactatcctttactcaccggtcaaagagtcttggactctttgttcccatgtgttcaaggtggtaccacctgtattccaggtgcttttggttgtggtaagactgttatttctcaatcattgtctaagtactccaactctgatgcaatcatttacgttggttgtttctctaagggcactgaagtaatgatgggtgacggtaaggatgaattgatagagaacattcaggtaggcgatgaagtaatgggtagagatggacttccaagacaagttgttggcttaccaagaggtcatgatgacatgtaccaagttaccgaaaaatcagaggacaatgaaaccgccaagattagtttccaatgtaacagctcacacaagctagttcttgtcactccacaagatataagactaacagagtctaaggaaaaggttaccgttgcattcaacagattggcagacatttcagtgggaaatggtactgaatcacgcactgttagactagttgaaagagctgaaaaatcttttgctaatgctgaaagtaatcaagctatcataaatgctgctgaatttgtcactactattgacacgacatccattgaatggactttggaggccagggatatgttgttggtagactcttccatccgtgaagtaactcaacagttgataaaccctgtgttgttggagaaggaacacttagcaggcgtcttaaaatcaaacgatttccaatcttctttggctccacaattttcgtatctgttgggtgctttcgttggctcctccggtaaggacaactcagaatatcttcaacaactgtctgctcaattcgataaaaagattgttgccgaaaagtctatcgatgtgcaatctaatgggaagaccgttggcactgctagcattgttatttctcaagagccagttcaagaaaataaacgcagaaaggtcgctcaagtcagtcttgtctccaagatcgttcaagaatctttctctagcggcatcccatcgttcatgatgtccgaaaacatcaatgttcgtgaaagtttcttggcaggtattgtagactctcaaaaccaaaagctagatgacacagtcgctctaaaaacactatcagtcaagacacatgacggtattgcgagattggcgcgttctttaggtatccgcgtttccggtaagaaacaaaaccaagaatacacattgactctttcaggtgatgctttgaagagtgtttcaaattggacctccacttcgaacatcgaaaaggttgatgtaattcataaggctcaacctatctctttcgatttagaaaaaattgagtctgctgattattttggtgtcactttagctgaagaatcagaccacaaattcttactatcaaacatgactttggttcacaactgtggtgaaagaggtaacgaaatggctgaagttttgatggaattccctgaattattcacagaaattagtggtagaaaggaacctatcatgaaacgtaccacattagttgcaaacacttctaatatgcctgtcgctgctagagaggcctccatttacactggtattacattggctgaatacttcagagatcaaggtaagaacgtttctatgattgccgattcgtcttctagatgggctgaagctttgagagaaatttcaggtcgtttaggtgaaatgcctgctgatcaaggtttcccagcatacttgggtgctaagttggcctccttttacgaaagagctggtaaggctgttgctttaggttctccagaccgtattggttccgtttctattgttgccgctgtttccccagccggtggtgatttctccgatcctgttactacatcaactcttggtatcactcaagtgttttggggtttggacaaaaagttggctcaaagaaagcatttcccatccatcaatacttctgtttcttattccaaatatacaaatgtcttgaacaaatactacgaaaagaactatccagaattcccagtgttgagagatcgtatgaaggaaatcctttcgaacgctgaagaacttgaacaagttgtccaattggtcggtaaatctgctttatccgatggtgataagattaccttagatattgcttctttgatcaaagaagatttcttacaacaaaatggttactctacctacgatgcattctgtccaatttggaagacttatgatatgatgaaatcattcatctcttaccacgatgaagctcaaaaatctgtatcaaacggtgctaactgggcaaagctatctgaagcaacgcgtgatgtcaagcatgctgtctcttcatcgaaattttttgaaccaagtagaggtgaagaggaagttcatgcagaattcgagaaattgttgaccaatattcaagatagatttgctgaatcaaccgattgatcaaacctaagtaaattttcttatggttccgaccgcaccccatccttactttgtttcaccttttacaccctatataacatagaaattcttaaacaaagaaaacaattcaatgtttgagattatcatcaaaaaagaactaattaattaataaagtactttattttaaccacatcttgatactgaagacgaacagtccgacctgtaaggtcacaactatgtataaaaattaataaagtagcatttgaaaaagcggacttgaaatattgaattaatacataatagaagaaatacttaactattttttaccatacacgtattctacgctttcaaagccaagtatggatgaagacagtaattgattgaaatcaattgagcttaatacaatctgacaattgaacgcctagtgaattgatttaaaacgttgacgaaaaaagacatcctagagaaaattaggatcacaatagcaccaacaataccaataataattaggaaagggggctatgagaaaatcactttagaatagttcttattttccattcaaaacctttccaaacccaatatatcacaatttgcaacggatttattatagagactagatgagaaatcataaacgttaaaaaggcaggaaaaaccataatcacaattaaatagaaaccaacagcataagagcattgttcaatgcactcgccattgcgcaactaaatctttgcaattatctcgtaatgagaaaagttctttccctagtttattgattcagtccgcttatttggatctagctctcaccttccgtctctttctcttaagtcttctaactctcttctttctccacttagcacgcatttcggtgatgaaataggtttctaagttcttgactttctgagaatcaaaagagaatatatataacaaattacataaatacaactgcaacaagaataaactaaattagaaccagtgaatatatatatgattttggaattctcttcaaaaaatcaaagtgttaggaagaaagcatccatatttaatttgtaccaaatccttaccaaggtttttttttgcaaatattatgtttggtggtaatttttcactcaaaaaaaagtgagcaattctctacggttgtgtatggaaagcgggtgagcaaggagtttcagtgcgggtaacaatatacatgttaaagcaaatgagggcacacaggttaagtacgtaaaacaggtcaaaatagcctcatttcgaagccgtaaaaaaaccttatagtcaaaacggtcaatctgcagtcagtggtggtgatctttggatcttattggcttgttattggtgcctcttttggtatgtaagtgatttatcagggccaacccttatatcttgaagctttgggttgggtattcgatttcctatttcggtattataataaactctttgattgtccgattgaccaaatttgggtgtaagggtgtttaactggtgtatgggtgtaagcagtcctaagttcttcggatgtctagcatgtttggcatattattcggtcatgtccctttgtcacttcggttatttatttcctatgtgaatgcactataaatatatataaatatatcatcatataatcatatatgacgcatcactagtttcatttgtggacggactcttgtcgtattgcttttcttaaatcagttgacatctcatgaatttctaaactatctaagactctgtctaaatcatgttccgaaagtaataacttttctccatcggattcatgcttttccttcttgctttcctttaaaatgtcagaatactgttccaggttgataaactcgaacttttgttcctcgctagtgattaatgactccaaatgtttggctccgaaatatgccttcaaattgcaatataatctgtaagttaaatatattcctggtacgttgggaaccacaggtattagaatcaatggtaaagaaatcggaatcccaagggcacagagaagtgcgtgtttcttatgatattgttgaccttttttcgaaagttgtttcaactgtgctataatggtgctttcatccaccacactcctggggaaatatacatgaatcggctttggtttcaaagaaattactgaatcgtcatttttggccttaacgtactcgtttaaggtaacattatccttggtcccattttcaatctgtttcaaaatataagattcagaagggatggttcgtaatgaattctccgtccatggaatttgatccaacagtttcgttacggttgaaactatctttttattataacttttttgggaagcttgcactgaataccaaagattagcagctttctgggaaagtttggtttcgtacctgataagtgctgattctttattcagtaattcattagaatatttgaaataaataaacgattgcttgtttgtgatcggtatcactaataacttcacgggatcgttaacgtactgttgtatagttgaactcttgttataagcctttgaatatgctgaaaatgaacgaattttaatcatcaattaattatgcaggttgagaacgggagggagctgttgccagattttcgtttgtggagctgtccgaggtctcccgtgtcacagctgtcagatgttttacagaaataaaagattagttgtttatcggtgctactgttccatccataagtttaaagttccggacctttaaaattactacgttaaataataaaagtcgaatccttactatgttgaaattgctatgaaccatgaatgaatatgcaaaaaagaagaaactataaatttggatgatattataagcgaactaacacatatcgggtcaattgaaaggtatcgacatgatcaagatgcaaccaatcgagtcgctagacgctgtaataagcgcagcgaaagatattttattgaatgcgagttcatttagaacgttttgtaatagtttttagtatattctttttcggcatcccaaatcctgtgttttttgggacgaaattgctgtcaattgtcatgaatcttaaaagatatgacattctgtcaaagtgcacttttgtgaatcctttgcattgtgagctctgatgaaagttagccattgccctctcgaatagatgtgctagctctaaagggcattatttttgcatgcacatactggaatacaagtggcgataatcaagtgcacgctctgctgttttaggtgacgttcactgttatcgagcactcaaaaaaagttgaaggttccgtgtacgtcattgcggcaagattttgttcgaatctcattagtggaataggagatacatttgatcacaattaagcaaacaatcgtttgcagttacaatgacttctgatggtataaatcatttagctgtgccgaaagagagtaatgggaaaatctcaagagtttctaccaagaattctaaggattcgctgtcgactgatgtatcaaatgctgattcgaagcagtatcctgagatcttgaatgcatattcgttgtatccccgtactgtccctcccttcgcagtggatacatgtgctaatagtggctcaaaacagtatcctaaacgaagtgaatgcgatcagatgttcaaggatacgttcttaatgtcgcattcagataaatggagtgaatttcttcaaaatgccggtagcaatccttcatacacttcaagaattattcttgacaaacccaagacagaatcaagtggtgctggcaccagaggacaatctacaatagtcagtaattcgtcgtcttccttaggtaagaatgttgacgaaaaggaaatcaaggggcatggaatagttgtcgatgaggaaactaataaacatacagatacgcatgcagtggataccgaagatggaactgcatactactatggacacacgacagatagcagttatgatgaggaagtagaaagagtcagacaagaaatctttcaaaatttagatggagattgggaaggtgggaaacgattggatgctatcttcaacgctccgattcctgaaagctacgaattgagtaatcaacgagacaagaatgagtggcttaaatacgtttcccaactcaaagctttttactacttgaataaggactctgcgaaacaatcttcggaaactcattcaagtgacgatgggaggtttcattctattttaaacaaggggagaaatagtgtgaatagtaagaaaaactcttgggctacccttgaacaaagaaaaaaacaacaatggttaccaagactacgaagacttttattgcaaagtcaatatctacctttgtcgttgagatttctcattgtgatactctgcataatctctcttggcctagcaagtagaatataccagaactcggattccactgtcgaatccttcgaatcatcaatacctcaacaaccaagtactatcatggcgctatgtgttaattccatcgctatattatatttggtttatatcggatatgacgaattttcagggaaaccgctaggaattagagatcctatgactaaagtcagactaattatgctggaccttttattcatcatattttcaagtgctaatttatcgcttaccttcaatacattatatgataatcgatgggtctgcacatctactggaacgtcacaagttgatcctccgcacgtaggatatatatgtgacaaacaaagggcgctcgcggcgttccttttcttggtcttggtcacttgggttgtaacgttcagtattagcatattaagggtcgtggaaagagtcagttctggtgctccaagaccctaagactattcttgaaacgggcccttccgacttaagacgcctgtagattaattgttttaaataaatcattattccatgagagtacataatttgtttacaaacccaacaaaagaaaatcaaaagtaccaaagaaaaccttataaacatataagtttgggccctgtattaaacaacataattagacgactgcagtatgctaaagtatatttgccgaaagctgtaatccttaccctcttttaagtactttaataataagatcagattcatattgaggaacaattcaggattttttgatattccaataatgtgtggcaaacgaaaacaaaaatataagaaattatagtaacatagtatgcaattatataaatcagtatataacaagtaaggctgtcaaaaagggtcaaaatatcgaacaactcggagatacttcacgatagaagcaatataaagttttcctgtgtgacccttttttataggatcccgccaacaagtggtgcatttcatatttagcagtgaaggcgctttctattctgttttatcctttctttcgattcattgaaaagggttgctcgactaattgggactcgaactgtattttctatcgctgctgatttcagtttactaccaaatctttatttacaagtaccgctacctgcgcccttgggaatactattattctaaagcgtatatttaactgggttagtgggaagcaagtctcattaacgcttcagaaaagataacttaggcatcgttcaatagaaatattactggtaaaagaaactacacgtgcaatcaataagaaacaagtctaataagctatggcagacacattacctagatcagatgatttggaagcaacatggaactttgtgaagcctgggatcgaccagatcttggatcgtgatggtacatcggatataaagacaaacagagttcagaaagttctttccccaaggatgtacatggaggtatacacggcgatttataattactgtgtcaacaagtcacgttctacaggtcatttccaatctgatattatagggaagcaaatgaatcaatcttcgattcttgttggaggagaaatctatgagaacttaaagaattatttgaaagattacatatcgaatttaaagaaagatgataatgtaacgtttttgaatttctacgtgagacgctgggaaagatttacaatcggagctattttcttaaatcgggtcttcgactatatgaaccgttactgggtgcaaaaggaaagaagcgatggtaaaagacacattttcgatgcacatactttgtgcttgatgacgtggaaagaagttatgtttgaaacacataagacggaactcgttactgaaatattcgatcaattggatttgcagcggaggggtgaattagtgaataaatctgctattacaatagcaataaaatcctttgtgatattaggtatcgatccatcagacttaaagaagttgaatttgaatgtgtatattcaaaacttcgaacagccattcctacagaagacaaaagaatactacacgaagatgtccaacgaattcttagactctcacagtgtctctgaatacatcgaaaaggcaaatgaatgcataatcttcgaagaaaaggacatgattttatatttggattcccatacatcggcaccattgtctacagctttgaaccaagttttgattgctgatcatgccgataagttaaaaaaagagtttattttacttttggataagcaagatcaaagattgattaagctcatatacgaattgatgaaacgcgattaccgaatgttaccagatttggtggatacttttgatatgtacatcaagagagtcggaaatgaagaaatcgataaattaattgatgcacataataagagtgcagcacaagattcaaacgctaaaaggcaaccgggattatcacctagagattacttgaaatgtttaataggagtttacaaactcttttacaatatcaccatagaatgttttgaaaatcatcctgcttttgctaaggctttagactatggatgccgttgcttcattaacaataactcattcgctattcctcctggttcacctaaatttgcgacttctagagctcctgagatgttggcgaaatacagtgaccagttgctcaaaaagtcgaccaagaataatgaacaggtagatttgaccgtggatgatatcatgactgtctttaagttcttggccgacaaggatgcatttgagatgcattaccgaaaaaatttagcaaaaagattaattcatggatcatcaaaatcagaagctgatgaagaaatcattatccaaagactacagtccgagaacagtcttgaatacaccagcaagattaccaagatgctacaagatgtcaaattatctaaaaacttgcatgatgaattttccacgttcatttcacaagatgggaataatactactagcgccgcaactttcagaagcaaagttcctgaattagaacctctaattcttgcagacaatgtatggcccttcagctatcaaccaacagaattcgcattaccaccagttcttgaacatagtaagaacaaattggaaaccatgtatactgacaagcattctggtagaatattgaaatggctatggccaatgtctcgtggtgaaatcaaggcacatattggtaaaccaggcaaaccaccattccaattcactgtgactattttccaaatggcgattcttaccttgtttaatgatatatctacgttgacctttgaacaaatacaagagagaaccaatttgaaggctacacagattgcgtctaatatgtatccgtttgtgaagatgaaactattaatacaatctccagaaggggtggaaagtatgatcaagttagatacaaagtacaccttaaacaaaccctatcgattatcgaaaactagtgttaattttgcagccgctgtgaaaaatgatctaacctttactgcaaccgttaatggatctgcattagatgaaacagaggcatctgagcaaaagaaagcagaaaaggaactaaatcaacaaagattgatgttcttaagagcatgcatagtgagaattatgaaggcaaagagaaaactaccacacagttcattgatgaacgagtgtattgccgaatctcaacagagattcaacgccaaggtgtccatgatcaaaaaagctgtcgacaatctaatagaacaagagtatttgaaaaggacagacgacggtgaatgctatgaatatctagcgtaaacgctcacttttttatccaccttttacttcgccatacatatgtataagaaatgtatatgtatcaacatatatttcgcaaccattcgaccattcgaccaaaggtcaaccttgggccccatattttcaagcatgaatattcccaagaaaaaaagagagacatcatgaaaggaccgacgagtatactattcattactcaatagccaaacctaaatgcttgggtagccctctctgctctcttgctgctctcactactctcagtgactaccttagcatcattcggaaggtgtttgtcaatacctgctgcaaaaatctacgttcatcggatttaaaatccacaggaatattcacgaaaattggtcatgattagactttagctcgaaattgagtgggaattttaccatatttcttttcattgaccatatttcaattatgggaaagaaaaaattcagatttcagatgagtcaagccatatcaaggcagtttcgatgacatgaatgagtctgaaaaaaaaaaaaggaactgctctacatttgatggcaggtgtttctttgtctagtttatatgctctcaggttcgactgttttgtttgtgtgatcgattcttgttacaacttaataatatttttgtgatattattttttattggagctatatattatactatatatatatatatttggattacattcatttcatttctcttagagtattataaggcagaataggagaatatttccatttgaagagcaaaaaaagtagataaactagcgatagacaataacaaatcatgagtagcaatcaggatttccaaccagtgactgaatctgcatcaagtgtgacaaaatttcaacaaaatccatacggtccaaacccagctgattatttatcaaatgttaacaactatcagttgatcgattctacattaagagaaggtgaacaatttgccaacgcctttttcgatactgaaaagaagatcgagattgccaaggccctagatgactttggtgttgattatattgaacttacttctcctgtcgcatctgaacaatctagaagagattgtgaagccatttgcaagcttggattgaaggcaaagattttgacccatatccgttgtcacatggacgatgctagagtggcagtagaaactggtgttgatggtgttgatgttgttatcggtacttccaagtttttgagacaatattctcacggtaaggacatgaattacattgccaagtctgctattgaagtcattgaatttgtcaaatccaagggtattgaaatcagattctcttctgaggattctttcagatcggatttggtcgatttgctaaacatttacaagactgtcgataagattggtgttaacagagttggtattgctgataccgtcggatgtgctaatccaagacaagtttacgaattggtcagaacattgaagagtgtggtttcatgtgatatcgaatgccatttccacaacgacaccggttgtgctattgcaaacgcttacacagcattagaaggtggtgcaagacttatcgatgtcgctgtattaggtatcggtgagagaaatggtatcactcctctaggtgggctaatggctagaatgattgttgcagctccagagtacaccaaatctaagtacaaattgcataagatcagagatatcgaaaacttgattgctgaagccgtggaggtaaatatcccattcaacaacccaattacaggattctgtgccttcacacataaagctggtattcatgctaaggccatcttggctaacccatctacatacgaaatcttggaccctcacgatttcggtatgaagagatacatccatttcgctaacaggcttaccggttggaacgctatcaagtcacgtgttgatcaattaaacttgaacttgacagatgatcaagtcaaagaagttaccgctaagattaagaagcttggtgacatcagacccctaaatatcgatgatgtcgactccatcatcaaggacttccatgctgaagtatctacgccgcaattgagagctgtaagaagagatgacaacgacgtcaatgacattgatatccaagagccatccaacaagaaaaccaaggtagagtaaaccttaagaaaggaaataaacataaaagtactagaaagctcataagacaagtgtaacttcttctttttgcctcgttccaccaagtaccttgcttttattcacgtttatgtcaaactacatttctctcatccatatattaagtatcttagtaatttattatagtaactcaatctgacacgcacaataaaaggcgctcaaacacaggccgcaagaaataaaaacttgtgcagataacagacggctggtatatatgcttactctcatttcttttgatgtattttctctggagtaaaaacagatggaataagccgggaagcaggacatattccgttcaaaaagaaagaccccagttctgacatgagacactaataaatactaacagtaactaaatgggagcccgaatccaccgcaaccgacaagacattattaagggtccggaaggagacttgacactatgtcactactttcatcatatataacgccattcttccatcactaaattcaagcctccctaaccaatcaggttctttagtgttctctttttcacacacatttttttttgtcaaaaagtttcaccaaaaaaatgggaaaaaatataaaaggaaaagaagaacctagttccccttgaaacacacatgtcttaacgaagtgggcccggaactgaaggattgatcacataatttgcgtcagttacagttagactagataaaaagttttaacaaagaatacacaaaaccataacaaacaatgctatctcgttccacccgttccattttgacccgtgcctccaaggttcaaccagctgctctcagaatgtactcttcttctgaaggttctgtcggttctaccagatcagatggctcttctgatgctttcactaagagagaaaaggcacaagaagatttctatgtcaagcaacacgaaaaggaacaattggctcaattgagagaacaattgaagcaacaacaaaagaaaatcgataacttggaagagaaattggacaacattaccaaataaggagccctttttgttcgataaaaagcctttagaaatgaccagctgattcttcaaacaataaaactgacgtttgtttcaaaatatggagttaatcgctaagctgcgttgtctctgtcggatctaattcttattattacctttatttttttttgttatttgtcattatactccatacaaaatccaaacccaattcattaaacgccctttttcaaagaaaaaaacctttaaaatattctacaattcgatcaactaagctgtctgttgattaatgagatcaacccaatcgtagttaatgtttttttctacgcagtcaaattgagaattttattattgacgaaattatgaaaaccaagaaaatggatacagattttttttttatctatcatgtcagcttaaaaacgcccgttggtaagcgctcaaggaagaagtgtttacttgttcatcttcgccgttttacagttctttcttatggaagcgttgagtatatgcgtattggctcgcgtatgcgctgacaccacacgtaaagtttttggtaatattgaaaatgagattaaaaacaaaactataatcatgtaattcaattttaatatattaacattcattatactataattagaaatcaatttcactcaggattacacaatggaatgaacagtcagtcctaacctttcgtaggttgcttcacagtgatccaagggaaacactgaattgaaggaaagatattatttacagtaacttagtagaagttaccctttcgtggggaagtgagttcagtcctattgagatatctaaaattagtaatccgatatagtgtaacggctatcacaccacgctctcaccgtggagacccgggttcgactcccggtatcggagaaaaaattatcctttttttattatcacttttgcatgttataatatgtagctcgggactgttcatatggtgctgtcatgattgtgtgtaaaacccagtcatctcactttaaatttctcattataatatattctgttttttccattaatggaaataaatcccacttaacacccatacactacacccatattgacagttctgccctgagatacgcataaattatattgtatttctaccgagcttgacaacactttttggggccggtggtagttgaaacccgtgctatgggatattctgacgattggcaacacgtagctgttcctgttttaagtgttttagtgtctcttacatctatggcgttgtcttgtacatcttcttctgtgtaaacttaccctcccttgttgtcgtttttggatcaacaaaacttcaaatcttgttcagttttccagattttctgaattttcaccgaataatatttttcactggaaaactagctagatttcaataagatattgaacgtttaattatacaacacgtatttattgataagttgtagttaggttgtttgttgaggttcaattgcttgttgttgcgattttgctatagatccacatatacacatcatacctaactagcaatgtctgacgctgttatttcttacgcctctttgatcttggctgatgccggtttggatgtcactgccgacaacttgttgactttgaccaaggctgccggtgcctctatcgacaacgtgtgggctgaaaccttcgctaaggctttggaaggtaaggacatcaaggaaatcttgtccggtttccacgccgctggtccagctgctccagctgctggtgccggtgctgcttctggtgactctgaagctgctgctgaagaagctccagaatctgaaaaggaagaatctgacgatgacatgggtttcggtttgttcgattaaacgtcaaaatataaaaaacaaataaaacaattcaacacattttctcaaggagcattcctccctccctcgaatttccttttagcgtcatattaatctattacttaccacaggtatcgtcatcatgaagaaatattagaaacacattggcaaaaatactggcagttgggacatactacactaataaacagagcatattttggtatctcatctactatctgtcgatacatcgaatatcgattttctcggaattggtacagttttttggatatgtcatttcatgtgtatatataatttgtattcgtatttcttctagatatatatcatctgtttggaatggaccatatcagactttgtggagtgtttttgattccttaatattttttgcgttataatatatatgagatatgcctgtgtacctacatctgtacagaaatccccttctttcgaattggaccctgtgcgaactttactgtgtagaactctatgttaagctttcttccattgttaaatatacgtctgccgaattgacatctgaacaaaaagaaaaatgataagaatcacccgtaaactagtgaagataatataggtttctaggtcacgtattcagttcgttagcctgtaattgaactatgcgtccgtatcccttaaacgtgcccatccttggctttgctatggtgctaatcggtcttatttctttttgaggctcaagcagaaagcactgctgctgggcaacgagaattttcttccaagaatttctttatttctgttacattagaattggaaaaaaaacaagatattgatatacataaaacttggacgtacatgaacggttttatccttgcgatgagtgaatacttacggaagtttgggactattgcatttgttcgtaagtgaaagtgagagaacttaatactacatatatcctaatagtaaggtctaaccttcctgctgaactttgtagcagaggtttaaagagaactgagaacaagtttaaaagcgagaagagcttaataagcttatcaagattttttatatcagagctctcggtcataggtcactgcgctccctttgagttttgaagagcagatgcgtacacttaggtcgaggagtgataaaagtgagtctacttgtaatagtgccagttcaagtgtggatacaagaggaagaatgcagacaataactccagaagaacctgggaagttagaatacgaactggatgcagcttctgctgcgggaaataataatgttaggtctagatcacagtcgatggcgctattgtcagatgaattgcagaccgaatatgacgtgctgcaggacaccgagcattcgttgagaaatactagactattagaattggatatagccaaagctgtttcggatctggaaaccatcgagcctcgcacagaggacactgtgagaataatagcgttattgaaccgatctctgtcggcgatatcgcactggtcattacaagcacaactatcccactgggaaaacagaaaggaaaaggatgaacgttttgcagttgaaaagaatctagtgaagaaagaagctgaatattttaagaataaacttcttgaaagtgaaaaattacaaaagcaaacgcaatcccaattagatttatcttccgaaacatctaaattggtcagcagcgctccaataacaggtggtagccctgccacagaggcaaccctactaagtccaagacgagtggtgaaacaacggaaaatagcatccccacgtcgtaacaacactcgcgctcatacaccagtctccactctcaagcttgtcgagaacaccaaaccacatcctaggttaaagagaaatttaaacgatcagacaaaccaagatctaataagagtctttcatttggagaaaggaagatagcatcatcccaaaattaataaaaggtaaaagcaaaaaagcatcttcatactgtatcattatttttttgttcttcattcaaccattgtatttttatttatatcgtgtctcattgaaatagacagtcggacttctaatcaaattgctaacaatatatcaggcataatctgtggaatgaaactcacttatttggacaatggacaatagaccccttttgaaactcggtgttttctgattcatatcccctcatgaacatctttcatctgaaataatatgttggtaccattatgactttcctctcacaataagctattcgcccattatgcaacgggtttaaccttaatcctgtttaattaaagacgcaactctatatccgatcttccaggcggaatgtggaaaacatcattttatttcattgtaataatcaaccactatattttgtattatgtataattccaaaaacaaacattaactaattaaacttcaattaccagttccattagattagctttgttagtagctgaaatcaatcttgtcttatttccattacacctgttctgctgatttgaaagtttctttaaatacatgctccattttgggcaggaatttcaacctgtaaaaaaaccatttgaagagccacacacagatcaagacacttcctgatcagagaaacagaattcattcatataactccaatatcgataggtacccggagacctgcttatattcagtactacaatttgccaaagcgcattcagtgattagttctttatagtcaacattttgtttgacatcatttaacgaagggattggttggtattattgcttaggggaagaatggcattattgagctatgcagcagatctttatatgcctcttttttgttcttcgagaacatcagtagtggtgctcaatttgatcaatttgttggcaatctattctttggtgtattggtcttcagattttcttcaagcaagatatgacgtgccagatatatttgtacctaattcgcaagattattttaggacatcgttgttggggtttctatcgccattcctgttgcacttcatcaaaagcttcctattcaacataaatccaagatatctggccgttgatatccttatcaatttcacttttaatgactggttcatgctcttgatcattttctctctagcatatcctcagttgcaagaatcgaaacccaatgaagaattggtaaatctcgtccgaaacaacggtcatataccaactgtatggcatattataccaaaacagtgctatatcttcggcatttcgtggtcctttagtgaagtaatcattagcgttatggagacgttgtacaattatgaggaagtaagttctatttcggaacaggacgcaaaagcaaaggcaacatctgctaattctgatagttccgaagacatcaggaaggaaattgaactagacaaatgtgtgagcgttagaatgctgagatcaaaaatttcaaagaatgtatataactctggatatggtgctacaaacgtaggaacaacgttatctaataacggttccgtaaatcaggactcgaattcggatgagtccagtatgattatcaatttcaacacagactcaatgaactttttaaaggatatagaaagccatggtaatgatctgaacacaagacatggaattccgttaaggccaagatcattttcctaccaacaattccctcacaggcaaatcaaaatgttccctcgcattcaaaactggaaggaactgataggaaaacttttgctttcaaacctcttacatctagactatatcgtgagcaatattggtcaatctttgctcatgtcaatttatttcatatacgttccaagccatccatcattgttcaccaaagtcgtgatatgtttcgggtcaaaaaccttcactaatttccttctttgcataataattccattcattacgttacatgtagtatatcatgttttcctatacacatggagagatctcgtgagtaacaatgtcgaaccatctgcgatacgtgcgcaaactcaaatgtcagactacacgtatggctccatcaggagtccactgatgttacaatcgtcaaacaatgttgcgtctgtttcatcaagccccgaaaatattctgctttaccattctattcacccacctgctgacactcagttccaaactgatgatggtaggctactgcgactttctcgtactatagtaacatattggcaatcgctagcatcgaagtcatggcttattccaatcggtctcaccgtgtggtcagtgactgtatttgtacttggaatcatggctactatcaaattcaacggttaaaatacgtagaatgtgggtagttcaacttataagaaccataccatggcaattagtctttaccgtaatgctgcagttaataccaaggacgatagtaatctgcccctctctatatgttatcatattcatattcaggcggtaaatcacgcatgtacagtttatgagagctagcttagttaaggatagaacaaaaaaactcttctgacctttcaacggtccgattttttagaagtacatttcctccgtactgcattcacttacttatttaaagtttcaatttggtacctcaggaagaggccttgagccttggcattttctgcactattgcttatgtttttcctaaaaagtataattaattgcatgaaaaagataaaaaatatcatgtctcttcaaggtctgaagtttgcgctgttttagaaggattaaattcattacacagcttctcatcctaagttcagctttagactttggtaaagttgcctgacatttctctgattttagccgagcaactggagttaaattcttttttgatcgaaccgttaaaaacaaggtgaaccctgattactttctgagagacagtctggtgtctatatttctgaacaattaactcaaaataccatggattcgtctgcacctttattgtcatctactggagccggtatccgcagatcctcttctgcgttggtaagatgtattgaagtttccaaagtagtgttccattcgtctccggtaaactatttgctcgtttttgttccgctaggattaatcttcggatatggacagttatctaccacctgggttttcgtattcaatttcatggccattatcccattagcagcaatcctagcctttgcaactgaacagctttctgaaaaggccggtagtaccttaggtgggttgttgaatgcaactctaggtaatgctgtcgagttgattgtctctatcattgctttgaaagagggccaaattagaattgttcaagcttcaatgcttggttctctattgtccaacctattattggtattgggattctgtttcttgttcggtggatataacagagttcagcagaaattcaaccagactgcagcacaaacgatgagttctttgttagccatttcaagtgcatcgttattgattcctgctgcgttcaaggccactttacctcacgataagggcacttctcatcttgttgatgataagattctgtcactatcaagatctacttccatcgtgctattggtcgtttacgtattgtttttgattttccaacttggttctcatcgtgtcatgttcgaagaacaaaccgaagaaactgaagaagtattgaacatccatcaacaacacgaacaaatttcagaatcaatgagtttgagatcctcgttgatcttcttagcaatcactactattctcgtgtccatctgtgccgatttcctcgttgggaccatcgatgacatcgtcgtgagtaccggtctatcgaaaactttcatcggtcttattgtgattccaatcgtcggcaatgcagcagagcacgtaacaagtgtcatcgttgccatgaaggacaaaatggacttggccctaagtgttgccattgggtcctcactacaaattgcccttttcgtgactccattcatggtactagtgggatgggccattgatgtgccaatgacattgaacttctctacattcgagaccgttattatgttggtttcggtgttcctatctaactacttgatcctcgatggtgaatccaattggatggaagggtccatgtcgctagccatgtatgcgctagtcgccttggcattcttctactacccagatgaacaggcagtgaattaaatgatcttcttatccgattattacttttcttcctttccctatcaaagcacaaggccccaaaaaccaaaaaaaaatctataaacactactcactaactctctccaagatgactagttcacatacatgaatcatacggtatatttccccgtaccgtgctgtgtatcaatttctaactattttctctgtatcataaagaaaactaccggtgtatagacaatctcaaaattactataaaactgaatttctcgaaaaccagcatttgctattttttcagttgttccttttcaaaattttcgctttttccaagttcatcagaatttcgcgagttccttaatttaaactatgaacacgaaaaagctggcagaaatttacttcattgcagggttttctatggatcgcaaagagtgaggttttctaaaaccagctattagaggttcaaagtgaaacatgaaacaacggatcgctgagaacttgggaaatggcgagcgatccgatcatggggcgatgcgttaatatgcgagcgatacttctataattatatgcgagcacatccatgtgtatatatatatatatacaacgagtgcgtattgaacttgtttcagtattgttttagtaggaactgtctgtatcaagcgatgggcaccagagaccatctcgagtagaagttgcacgcataaagtgataggaaatatgtcagaacaccaggcacttctgcagttcaataaacaggtggtaaatctggagatggttcattttttggccgctacaacagcgtcagtgatcagcatcaatgacaccgacgttcgccatggatctacggtgagcctggtagatttcattaaatcgttgatcaggcactctaacgtgcaaactccgacactgatggctactacagtctatttgactaaactgagatctattctacctcacgatgtatgcggaatcgaaaccactagacataggatatttatcggatgtttgatccttgcagcaaagaacctgaacgattcttccccattgaataaacactggactaattatacagatggtcttttcactttggaggatgtaaataccattgaaagagaactgctttcgctgtttagttggaacttgaattttagtatgcaggaattggtacaggcactttctcatttcttagtaccgatccaataccagttgagtaccaagaaatcgatacagaaccaaggtgccaacaaaaattgttcacatctgttattcaacgcaccagtgagtgggcaaacaaaaaatttcctcaatacagaagcgcattcaaggtcgtcatctcacatgtcgatcccctctttgtcttcatcgaacacattgtctacaatagactcgatggcttcttcgtcatcgtcactagcatattcatcatcttctggctcgtcctcatcttctggttcgtctttatcccaaagcaaactgaaagttatcagtgaggagccatccgcaaaggtcacaccaaggaagaaatttggtctaacgaagcctattatgttgaattctaagtcttgtacggactttaaagcattgcctgcacatgcagtcacaaacacaaataatatatcttcaaagtcaggctgggcttcgatattccattaacggacggattgccaacacattgaagcacgtaggtgactatttggtatttgcatttctttctctcaactttctatttcattcaaacgtacatactctcgcacatatatgtattcattaatataatttggttttacttcggagaccctgtattgctttgcctggcgaaaatataccattgcactactaggtcgaattaaagatgaattcaagacccaaaattggaagggatagctaagactgatgaatcttttaaccatattaaaaccagttatctcaaatatcctgttacacgtgattaatagataatatttaatctctacgtaaatttagcaacaagtattcctctgtattgtaatttattacatttcattttgcatcgaaaaagacctgttatgttttgtgaaggttatgtatctaactgtacaaatcatcgtcatcttcaccagcggcatctccgaaagctgcaccagaaccctcagcaccagcttgagttgcggcagcacctgaatcatcaccaaacgagaagttgccgaattgtcctctggatgccttcatctgttgagcataagcttcgtaacgacgaagctcagtatctgtaacagaacgcttggctgttttcatagcttcagtgaagtgttctttggtaatgaatggaactggatcctcttgttgaacgtctgacatttcaacgtcttcttctgtcttgaccttctcggtttcttctgcaccttcttctttcttgacaacttctgcacgtttttgtgcctcgatggaatctttaatggcaaacttcgcagctctctgtacgatatataataaatctgcaccagagaatccctgtgtagcttgagcgatggtctttagatctagtcctggttctaatggtgtatttcttaattgggctgatagaatagataatcttcctgtttcgtctggtaatggaacgtagatcaattgatccaatctaccaggtcttaaaatagctggatcgatttgatctggtctgttagtggcaccaataacgaaaacgttcttcttggcgttcataccatccatttcggtcaataattggttaaccactctgtcagatgcaccacctgcatcacctaaagaaccaccacgagccttagcaatggagtccaattcatctaagaaaacgacagttggggctgcagctctggctttgtcgaaaatatcacggatattggattcggactcaccgtaccacatacttaataactcaggacccttgaccgaaatgaaattagcagacacttcggtggcgacagccttagctaacaaagtcttaccagtaccaggaggaccgtagaacaacacacccttcgatggtgacaaaccaaacttggtgtattgatctggatgcaagactggatattcgacggtttccttcaattcatccttaatttcatccaagccaccgatatcatcccatgtgacattaacagattctacaacggtttcacgcaatgcggatgggttggagttacccaatgcaaatctgaagttgtccatagtaactcctaatgagtccaacacttcggcgtcaatttcgtcttcatctaagtcaattaggtccatcttttcacgaatttgttgcatagcagcttcagaacatagggaggcaatatcagcaccaacataaccatgggtttcagcggccaacttttctaagtcgacgtcgtcagccaacttcatatttttagtgtgaatacgtaagacttccaatctaccagtaacgtcaggaacaccaatatcgacttctctatcaaatctaccgaatcttctcaaagcaggatcgatagaattgggtctattggtggctgcaatgacaacgatgttggatctagccttcataccatccattagagtcaataattgagaaacgactcttctttccacttcaccgttagtcttgtcacgctttggtgcaatagaatcaatttcatcgataaaaataatggccggagcattcttttctgcttcttcgaaagcctttctcaagttggattcagattcaccagccatcttggacatgacttctggaccattgattaagaagaaaaatgcacctgtctcgttagccacagctctggccattagagttttaccggtacctggaggaccgtacatcaaaatacccttcggaggtttgataccaatggccttaaatagttgtgggtgtctcaatggcaattcgaccaattctctaatttgagccatttgcttacgacaaccaccaatatcatcataaccgacttcattgatgttattttcttcatcttctctgttaattggctcaccttcactatgaatgacagtatcttgggcaacaacaccgtactcttcaggctcaacgtctacgaccttgaactctacttgtctcataccacctctaacgataaagtggtcaccttttctaaccggtctataagcttcgacaaagtatggcttcaagtacacatcaaatagattaccagtcaacccctcgatggtgtcagcgattggcaacactgagattctggaagcatacttgatatcggtacatggatggatagtgaccaaatcaccgagtcttattctcaagttgttacgaataacacggtttactctacagacaccatcttccagttcgtcatcaatcataacaatcaaaacggtgtcctttctcttcttacccttgactaaaacggtgtcaccacggaacaattgtaaaagatccatagtgttagaattgatagcaatgatagaattgtcatcgttaactgcatcatcgaccagtaacatgttttgcttcttctttcttctcaagatggcagtggcggtagcatcatctgcgtcagctgcagtgccagaactatctaacaatttcttatgttcttctggcatgttctcttaataactgaggtgaaaagttgttttaaagatactgtaattccttctggtaggatccacgatgtaattaagctcttggtaaacaggatatgcaggtttcttgattaacttctgaaattggaccttatttcttcttatttcaaccaaaagacggaagataaaacaaaaattaaataacttgatctaacccctaatctggtgattcaatgattcaattaaaggagacaattattgtaaatccctggtgagtgctttatttaatctagcgttcacttactggtgttaatcctgaaaataaccttcaaggatcaccgaaaatagtgtgcaatacttatatataataaatcgcttccctctttataatctagagatttcagaatttgccaccggatatgtgaaatttcggccgggtaacaatattttttcatctcctctctaagaagatccctcccacaatgcgaatgagctattggattccttatgtgaatggtaagtagaaattggtacagtaggaaatatgtagttataatatatatgagacgatctcaatgatcatcttcgttagcttcgtcagcttcgtcagcttcgtcatcttcgtcatatcttggtctctttcattgcgaaaaagatcgcgcttaggtttctagtttggcaagcaactttttatgcatttcactcagcttagcaaaatcagtttcctgtgcaggccaacctacgattaatccagcatcctttgttttctttgggatcaaatggaaatgcacgtgatctacttcttgatgggctattctaccgttgttttgaaggacattgtaccctggaccatcaggaccatcttggtcgaagccaatggctttcactaacttcttagtaactggcaacaggtcagctaagtattcatctgggatgttgtgcaatttcccaccgtggtgctttggaatgataagaatgtggttctcttcagttggttggatgtcaaggaacgagtaagaatactgagtttcaaccaatttgaaagaagggatttcacctgaaagtacaccagtagtggaatctgttagtattatagttcataagatcaaagagctagtctaagccacttgggtggttgcgagcatgcaaaaaccaaggggagaaacagatatttgttctcacctaacaatttgaggtttacatacctttgataatcttgcagaaaatacaagcagcgtcgtgggcaacagcactcattggtatcggcttattaaacgtttgaattcacacgtatcggtacttattgcaatatttctttcgactgcgaaaatgttggagaatctgcaactaattggagttcagtcttttttcatcattatacatttgtgtattggcccttatatatatgttcttatgatataaaaaaaaaccaagttctagaaaactagaatagttggtgacacgacatgagaatcatgattcggagtggttctcgtactaatgtagggcacgacattccaactaatgattgtttctggtttaatggtagacaatactagaacctatctttagggtatctgccttaattcttttctagatttgctgtatatttgttaattattcttgtccaatttattataattgttccagaggtgccctttcaaagtggaaatgttgtaattcctttacaaaagttatatatagggattgtgttgggagccgttactattgaacgaatgaaacctgagattataaagcgctaccagagctcagcttaaaacacaaagctttctgacataatcgcttcgatgacgggcatactgacggaataagaaccacgtgatattaattgtttcacagatatgctcgaatgaaaaaaaaaaaaaaaagagaaaagcagagtcatcgaatagctccacgaattaacttgaacattttattgtttgagatcatcttgatatatattgagatcctttgtgtacttcatagcttgctgattttatcgcttaagacctgcaggggatatcttcttcggcagattattgatctgatcttaatatcttagttttccttcttcgatatttagaatcgcattcttcctcgataccgaacatatattacgacagatatcatgattagagcttcaattcgtgccagttcgagggtttctagccgtttacttgcttgtaagaactgttatgtccctgtctcacaaagaatcactagtgcgttggtatcaggatccgctgttaataacaacattagattctactcggataaacctcaaccaaagttgactgttgagaattatccaaacattaaacgtttggaatcattcaagaagttgggtaaggaagatctagactatttcaaaaccattctctctcaacaagagatcttggaagcgaatgaaaacgaagacttggctttttataatgaagattggatgaggaaatacagaggccaatccaaactagttctaagaccaaagactactgaacaagtttcaaagatcttgaaatactgtaatgaacaaaacttagctgttgtaccacaaggtggtaacactggtcttgttggtggctctgtaccagtcttcgacgaaattgtgttgagtttgactcagttgaacaagattagagaattcgacgaagtctctggtattttgaaatgtgatgctggtgtcatcttggaagccgctgatatgttcttggcagaacgtggctacattttcccaatggacctgggcgccaaaggctcctgtcatgttggtggtatagtagccactaacgctggtgggctaagattattacgttatggctcattgcatggaacagtattgggcctagaggtagtgctaccaaacggggagatcgttaacagtatgaacgctttgagaaaagataatactggctatgatctaaaacaattatttatcggatctgaaggtaccatcggtgttgttactggtgtttccatcttgtgtccaattaggccaaatgcatttaatgtctcattcttaggtgttgaaagttacgaagctgttcaaaaagttttcgttcaagccaagaaggagctgggtgagattttgtcagcctttgaattcatggatttgaaatctcaaaacttgacaaaaatacatttagcagacatggaccatccattggctgatgaccatccattctacattttaattgaaacttctggttctaagaaggaacacgacgatgcaaaattggaagccttcttggaaagcgccatggaagacggtttggtcgttgatggtgttgttgctcaagatgaaactgaattgaagaacttgtggcagtggagagaaatgatcccagaatcctcccaagccggtggaggtgtatacaaatacgatgtttccttgccattgaaggacctatattccttggtggacgctgcaaatgccagattagaggaacatggattgttaagcatagacgacgagtccaagccagtgatatccgccgttggatacggtcacgtgggtgatggtaatctacatttgaacgttgccgtaaggagatataccaaagaggttgaaaaatgtctagaaccatttgtttacgaattcgtctcttcaaagaatggttccatcagtgctgagcatggtctcggtttccagaagaaaaactacatcggatattctaagtccgaacaagaaatcaagatgatcaaacaactgaagaatttgtatgattcaaataccattctaaacccatacaagtatgtttagagagacaattcaatccagtggctgtgcaatgacagacaatgtacaacacatagggtaggagaacaagctttctatgtatagatcccaaaacgtactttaaacagttcattacgtatataatatattcacattttcaataaacactgatatatagtagcaaacgattatgcaaatcaattgactcataaaaaaactgaagactttgactgacttgcaattcctttcaatcttggcgtcattacgaaagtaatcgttaaacacagtaatttcgtcagtactgtatatttgtggcttaatcagtggcacttttcttgattagtaattaaggttcaagagtcatagagatgtaaagacaacagcaaggccaatactgaacaaaaagacataaaaaagacattattaagggaaaagttagcacgcgattgttaactcgacaccggcaactgcggttgcatcaatttgagccgaacatataaaaggggagcgtttttataccctaatacaactgttgggagcggaaatcaattgttgtctatacaatttcaattgttacttcattcaacactaataagcattccacaccgtcggaaaccacattcatcaggttcaccaggcttataattaatatcatgactactcaaaagttctttactttgtctaatggaaataagattcctgcagttgctattgtaggtacaggtactgcttggtacaaaagcgaggagacagatgccactttctcccaaccattggttgatattgtgaagaaaacattggatactgtcccaggtgttgtgcacattgatgctgcagagatatacagaacttatcctgaattgggtgccgctttgaaggatacaaagaagccaagagatgaaatcttcatcactgacaagtattctactttgaaacagctttctgagaaccctaaagttgccttagagacatcattgaagaagctcggtgttgattacgtggacttgtatctattgcactctcctataattaaggaaagcaaattggatgtcgaggctaattggaagtatttggaagaactatacaagtctggaaaggctaagaacatcggtgtttcaaactttgctgtaaaagatttggagaaattgcttgcagtggcagaggttaaaccgcaggtgaaccaaattgaattctctccattcttgcaaaatcaaactcccggtattgttgaattcagtcaaaagaatggtattttacttgaggcctactcaccattaggtcctttgcaaagaagaccagaagatgctgataagctacctttttaccaatatatcgctgaattgtcaaagaagtataacaagagtgaggctcaaatcttgttatcatgggtctatgagcgtggaatcttgccagtaactacgtcttcgaagatcgaaaggatccaacaagcgcaagatatctttagtttttctttggctaatgaggaagtccaaaagatcactcaattgggtttgcaacatccagctttgagattatactggactgacgtatactcaaaatacgattctgaatcccagaagtgattattccatctcagtatgttatgtcaatgaacactggctctgagagcacacatctttttaataggcttgttaaacatctgttgactatatttacaagtattgctttacgtgatactattcctttaggataatgtcgtatatacatattttcgtttgcagaatgaggttcatataggaaacttttaaaatatagttaaggcaagaacttccctttcttcaagctttccacagctgtggttgaaatatgtcggaatctagcgggccccaatgctgtcccaccgtaccatcttgtaacaacaactaaaacattagcaatatgacttctttctaacaaggttaaaagtctttgtcctgcaccagcctcaccacagtcatttgatccttgttgtatattctttaacattgccggccctgtcagttcaccaggcactgtcaatgaaccccttttcctcttcttatttcctttcttattgtgctcggggggtataatatctgccgttctccatgcatacatatgcttgtgcgttgccttttggacggccttatttttttccactaatacctccagtaacttatcaacttcagacaggttcttgatagcatggcaccttgcttgaaacttggattttctatctaccaaaacttcggattcgttccaccctatacctgtcatgtatcttctggtaattcttagataactataagatcgtagcataagatgtcgacctttaccataagtatcaaatcgccgatgtatattaatttctgtccacctgcttgaatagatgtgtgacctcctcgattgagcacgctccgcatgtgttcatgacagtattggggtctagataaccttcataattttacgttgttgtgttctctgctgcttatgaatttctatatcgtctgtccttttatatcgaagatttagcgatgaggttttagtctttcaatttcacaaaactcaatagatgaacgttattcagtcgaactaagacgtttaagtgaaaacacccagaaggtggaacgctatccttataatatccagccaagattacctgaatgcaatcgaatttcacctttttggtttcacaaccatcatgttcgaagacaactccttcaggttaccgagctttccaatgtaaagatgacaggatccatcctttgaaggtaaacaccaaaaatcgggctgctgataccaatagcataatacaaaagttctgttatctacgaccaaggagtatgcctattgtaccgacatcaaaatatctgcacaatcaagagcattcagactttcttttggttgcaaggaataatggcataatcgaaataataaaggactacaattttaaggtaaccaataacgttcctttacgaccagattttctactattttgcgtaccaatgacttcgagtataactacaaatgatacaaccattgttggtttagagtataaagataagtttctatatgtatgttctgcggttggtgacatatttgggttcatattgaacttaccagacgattacgttcaagacgaagaatttcaagcatcaccttcctataaacggtatagagattctttctcttggagatcggacatagtacaatcttctgacgcaacagctgcagaacggagcttaaaagaaatcactcgattcagaaaagaacatagttgtggccacatttgttattattgttatcctatcaatgaagacggattcttccatgaaacgataaaacaatggtatcccgaccctgtaccgacattttcaaattgttttgttacgtttttgaggacagatgttagctcatttcatatcaacccgatggacagattcagtgtcatcaccgtggcaccgcagacgccgttaacaattcacaaaatactcttacctgaggtgtatacgacattcttctcagaatttgtaaagcttaaagatgagtacttctccaaaaagcacagaagggtttcagaaccttccagttttgattttatgtcaagagcggttcatgggacagcttttcaagaatatttgaagagagatcgttcaagctttgtcatggaacaagatgttagggtatggaggggaatgctggtttgcgatatggtttgtgaattcaaatgctcctccgtttggaggcaaaaacaaggtaatatgaaagatggcttacatgaattgttcttttatgacaaaaaacaagaagcaaataatcgcaatgaaagcgattctgttgctagaaatgaaactgtagtcgacttggagctggattcccaatcattctcattacttggagtttctaccgagatattagataatcatacccaacaccaatctaatataacacaaactgaacggtttctaaaattcttgcggaaacagacgttccctataaatttccaagtggtaaagacagtaagcctcgacggtgaaacaaattcgacagggtatgaagctgcaacttcttttcttacagatacttacagagatatggatgttgttgttgtggacaaatttttaagtgtaaacgcttttcgtcctaaatacgtggacgagcctctgatgaagttagattcaatacatgactatctggaagtaaatgaagaagacagagatgctcatgtagctttaaataatctctcctcattcatcaagtttttcatgcttactgattccctttgcatgatttgggatatcaatggaatattgttggtggatagatttcagctaagaagtacaaggaatctactacataacgatgtcggggctgttaaagtaataaacttccgtgtaggaatagtgaatgatattgggttagttttaaatcagttcaaacaagatggttctgactattatattgagttttattccatcttaacaacgttaacgggagatatcgcactactgaggggtgaattcaaagttggccaacgattaggtactatgaagatattagatagtttgagaacgcaacaatcggataactttgttgaccaaatattgattacaaactactcactatccaataaaagagacgctggaatggtaattcctgaggtttttaaaatgaataaaagatccaaaacttagaagtctttcaacaatgtaagtcaaaataatctatacgtttacgtgaatagcagctaatataaaccctaattaatataatggtaatccttgtagaagatgtacaacaatcatgaaatagcagaagtaaaaaaaaaatgaggtgctgataattaaccgcccctaatcatacactttctgtgtatggtgggggagaaccctttggcacatcctgagcgtagttatttggttcatatcttagaggaatctgagttcttggcaatagaggatcttctacaccagtgggttgatgagaaacggtcgttaccgcagatgggcttccatatctttgtccgtcattccacccttgctcataataataacgtgtttcggtatccgtccttagcggtgacgtgacggtaatataataaaaagcatgaatcattccagggaggaacccaaacatagttagcaacacgtttaatagtaagtcactggaacataaacccgatctcaatcccacggcaatcggtgggaatattatggcaacaatataaagtatcaaatctgatacagtacagcagatacagcacagacacatgtttcaaaagcttttgataatacactgctgggagtataagggaaacctacgaggctcttcttctgtatcccaatgttgtgaattgagatgattaataggtatgattcattgttcaaattttgacaattatcaactaaagaaaactatgggaaacgccatacatatgacaaaaatgattgaagccacatagaccatttgtgaatgcttataccgaaacaagtacaggcttttgaaagccagtagcgaatgtatatcttgacacccctttgacaagctatatctcgttatctaaatcaacatggaaggaaaatgaagtcacatggtaaattaagtatacacgtacatcttagaatttttgtttttctgtagtgatatgctttggatgatagttgattgattaatcgcctgatgagggatcgttgatatcaaacaatataacgaatataatataataatctatttagttagatcgttgagtttatgcgtccttgctcttctttctcttgttgcatccaacctccccaagaggtcgcaacatagctcagccttttatactcgacttatatactcggatggtcgtcagacttcgtcatggcaactcgttgcctccatgcccttgtaggtcctgtgcagctaccgtcctccacgcgcactcaagaccatcacgtgacagtctatgatccatctatgccatccctctggataccacaggatccatatgcccagtcactgacgtcttggaactctgccgtgtgctggctagcccacatgacctctcgtctggcttgtcctcagtctatattacgacatttccaacaaatttggttccttggcccagttggttaaggcaccgtgctaataacgcggggatcagcggttcgatcccgctaggaaccattatttttatcgctctctatttttggctcagtttattatttgacaagtactagtgtctgtggaaagcctaatatataagcctcgcggaaacagcagccgagaaaacgcagttggcttgcaactattttttcatctttccataaattacgctagttagtacaatattgttcaaaatctctgctattcttctgagacgagacttggttacacatatatatgtatttggggtatctatattgaatcaccttctctttttgaaaccggagtaggagttatactttctatatctatcgtttgagggttgatatgagctgctcccataacgaggaatattgacgttaggatttcttgggaaatctaacggatgtgatctcgttggttttggtggtaaaactttacccttgactgtaggagcaggtgcgtttgatgagccattactgtgattatagttggaccttttggactttttgttatatggaggagcataaaagttagatggctttgcatcaccgtagtccatagctggttgtttcttatttttgttattattataatagtagttatcctcaccgtcatagttgaaatcgtaggtgtcatagtcatagtcgtcatatgtgtactcgtttgccgtcctctctttgtattctttcaaattcctgccataatcctgccttacagatgacggaaggttgtttccagcaaacgcagaaccgtcatcgttaggtaccctagaagacctagccgacatacaatcatccccgaaatgtccttttccaccgcagttatagcagaatatcagatgcaagggcataagtcttttctgtttggagtccttgagacaataactcctccaaatactcggacatctatctcttgaatgcttgctgctattacaaagcgtgcaaaacacacgcttccacttcacaggacagtgttgtctgtaatgaccgggctcattacagtgcgagcatctcatcgtctttggacaatgtgtcgaataatgatcatccatcacaccgcaatatgaacatatcacatgaggacaatttttcttcaaatgacccctctgcgaacagttgttacatttgggtagtggctctactattccatcctcaccatcctcaataccaaaataccgtccttgcccacgtatctctcttaacttctccggatcagaatcaacctcagttatgcttggtgctattattttatctctgtcggtgatttcataactcgggctggaatccttgaaaaaaggaagtgtatctgcagtttcaacttccgaaagcattagtgttttcaatagttattggctcactctagatatctgaactatctaaatactgcaatctctgtatatcttttattgtgcgagatgagacgagatgagattgtacgttttctatttgaaatatgatttttttcatttcacttttgtcaagtacgaagtatttttttttcttatggggccatagtaaagaatttgacgagcgtcaggaagccatagatgatatgttagactatattgatgcctggaaatttgaggataggtggttgcgattagcacttttaggagggatgatgattatagtcccggttcttgccattaatactgaataaaaaaaaacatgtgagcacaatatataagacagcattctggtcatcaaaactccaagaacagaaatccactaaaatgatataatactgtaacctcagtaaggtccgaaaccaaatgggagaatgtttccaatattttccactggtacattagtatcaatttgatacattatgaagagtactcacgtgaccatcgtccactatgattttcgatctcatcgttgatctctgaaaagaaagaaaaaaaatttcgaaaaagagatttgaacacacaaatcgttaaaaccaaaagttcagtcatacgaatttgcacacacatacggaaggaagatttcaaccaattcttccgtgtactattattacagcaggcctccctttctgatagccataagatataagaagaactcaaaaagcaaaacagtatgagtgctgacaacggggtgaaagtcgttgcggagcaggtacaagatttgtccttggcaggtgagaacaaggctgttgaagctcaagctgagaaaccactagtgaataagaaagaaaagaagaaggagaagcacaatggtaagaacccattatatttggaccctcagccagcgttcattgatgaacgtatacaaatgttcgaccgtttaaagaaggaatacgatgacaaagttgcagcagcaccacgcgttgcattaaccgtagtcttgaaggatggatccactaaggaagccaccgcatgggaaacttcaccaatggacattgctcaacagatttcaaagtctttctctgaaagacaatgtatttccaaggttaacggcgagttatgggatttggagagacctttagaaggtaatgaaggtgatgaacttaaggttgaattctttgattttgaatctgacactggtaagaaagtgttttggcattcttctgcccacgtcttgggtgaagcatgtgaatgtaacttaggtgctcacatctgtttaggacctccaactgatgacgggttcttctacgagtttgcatgcagagattcaatggatgccgattctccagaaagaactgtgtcacaagctgatttcccaaacttggaaagtgtttccaagaacgtcatcaagcaaaagcaaagatttgaaagactcgtcatgtctaaggaaaatttattgaagatgttccattattccaagtataagacttacttggttagtaccaagattccggatggaggcgccaccaccgtctacagatgcgggtccttgatcgatttgtgtactggtccacatatccctcatactggtcgtatcaaggccttcaagctattgaagaactcttcttgttacttcttgggagacaacaacaatgactcattacaaagaatctacggtatctctttcccagataagaaattgatggatgctcatttgaaattcttagctgaagcttccatgagagatcatagaaagatcggtagagaacaagaattgttctacttcaatgagatgtctccgggttcttgtttctggctgccacacggtaccagaatttacaacactttagttgatttgttgagaagcgaataccgtaagagaggttacgatgaagttatcactccaaacatgtacaactccaagttgtgggaaacttctggtcactgggctaactacaaagaaaatatgttctccttcgaagttgaaaaggaaacatttggtttgaaaccaatgaactgtcccggtcattgtttaatgtttaaggctcgtgaacgttcttatagagaattgccatggagagttgctgatttcggtgtcattcacagaaacgaattctccggtgctttgtctggtttgactcgtgtaagaagattccaacaagacgatgctcacattttctgtacccaagaccaaatcgaaaatgaaatcgctaacattttcgatttcttaaaatacgtttatggtgtgttcggtttcgaattcaagatggaactatccactagaccagaaaaatacgttggtgaactagagacctggaacaatgcggaatccaaacttgaaactgctttgaagaagtggggtggtaactgggaattaaatccaggtgatggtgctttctacggtccaaagatcgatatcatgatttccgatgccctaaagagatggcatcaatgtgctaccattcaattggatttccaactaccaaatagatttgaattggaattcaaaaccaaggaattggaaggtagcgacaattacgaaagaccggtcatgattcatcgtgctatcttaggttctgtggaaagaatgactgctatcttgacggagcactttgctggtaagtggccattctggttatctccacgtcaaatccttgtcgtaccagtcggtgttaaattccaagaatatgctcaagaagttcgtgacaagatggttgaagctggcttctacgcagacgttgatctcaccggtaataccctacaaaagaaggtcaggaacggtcaaatgttgaaatataacttcattttcattgttggtgaacaggagatgactgaaaaatccgttaatatcagaaacagggatgttatggacttacaaggtaagaacgccaccgttcaagtagacgctgtcattaaccaattgtccaagttgaaggaagaaaagagagctgataatgtcttggcttaaaggaatatccaaaccgatcatatatttgtcaacagaaattctaatttattaacctttcaacagttatagtttgtcaacactatctcgtcgttttaactcccttaccatgcaagtcgtatatttaagctaactatcttttctgtctcttaactcatgtatattgttagatataaactaatataaatttcactaattatcatcggaaataatatgaatgatggacctttttaattcgttgtcatagatggaatatagctctaccggagcaatcaagccttctgttaagtgtgatttgttctgttgtcatgtatgatgtttgaaaatttatctctttttacaagtactctcctttgttctgcgtgatgcaggataatcctgataagatttctgcgaacttcattatttataattggtatcgctgttatcataatcatgttttctaatttcttcccatgatttaccattctttgtgtctacagcggtgttctcctttctaattttgtcccacgatgacagagtgggttcctgtgtctctgtgtcattgaatggatcataatcatccctcggagtcacctgagaaggtggggtagtttgagagacaccagtctttggcacaccttccttcttatcgtattgaggtcctgtatatagccccattgggtccttgttgtcgaataaaactgaggagtttctcacgccagaattgccttccttcaatttgtccattacaagtctgggatcaggaattcttctttctggattcttatatgtcatgtaataatagttcgcccatctggtaggcattcccatgtttaatagctttagaatttcgtactgcttctgtcgactactttttggcaaatgcggatcatcttccagtatgtctggtttagcagccttaagtttagatttgtacgccaaggagccaccagcttgtgtgccaataaacatagataagaatcctagagcaaaagctctagtaacttttgtcccttttatagctccagttttcatgtattgattaacgaaaggaataccagtaactattgcaaatgcaccccacccagaccataattgggcccttgctactgaaagataggtcttagatagttccaatcgatccttaggatccaatactttgtccttctcgtaaaattccaacgcattgtcatacgcttttttaaaccatggtgaattcacaacagctgggttttgcatcgctttatctacaccaaatcccattgggaatgatctctgtgagttttgttgcgtttctgcgttatctccctgcattacttcctatgaagatcgaaacttccaaaaatgtctgttaaaaaaaaagcagaactcgctcgttattctaatagttcgtacacttgcaaaactacagcttccaatgcgcttctgatgttgttatttaacattctcagtttaccataacttcactttatcttaacattcaaattatcgatcatcccttatgtatatttacgcaaacaacggtaatttaacaaatatgccacataatgcgaaatattccaaaacttagccgattatactgatcaatacaacagtaaaagagcattaggcgctatactgaatgtgatagtaaggacttgtaatcttatatctactagcttgatacgttccctattgcacgtgaccacattctttactacaaccaagtttcttttccgaacgtttgattcaaaattttaaagctcatctcggtcatcgccaaacatttacgaactaacaatggctacttgagcaagctgtttgcattgatatgctctgttaatcaactgacgggaataaagtataataggataacaattacaagaagtttgagatcgaaatgtcacgtccagaagatttggcaccaccagaagtgttttacaatgacagtgaatctaagaagtatagtggctccacaagagtgcaacatattcaagctaaaatgacacttcgggccttagaacttctcaacctgccacatacatcatatatcttggatattgggtgtgggtctggtttaagtggtgaaatcatcactgaagaaggacatatatggtgtggattagacatttctcctagtatgttagctgaagcgctagaaagagaagttgaaggtgatcttatgttacacgatataggtcaaggtattccatttagagcaggtgtatttgatgcggcaattagtatatctgtgattcaatggttatgtaatgcggacacatcgtacaacgatccaaagagaaggctcatgaggttcttcaatacactatttgctagtttgaagaaaggaggaaaatttgtagcacaattctatccaaagaatgatgatcaaatagaccaaatcttgggagcagcaaaagtagctggattctctggtggccttgtcattgatgatcccgagtccaaaaagaacaagaagtactacttggtattaagctccggatctacagaacagaatgaacaagtcaacttggatggtgttaagatggatgcagatctaatggtaaagagagagcgtaaaaagaaactagttgaatcaagtaaggattacatcaacagaaagaaggaggtgatgaaaaaaagaggtagaaaggtagctctcgactcgaagtttacgggtagaaagagaagacctaggttttagtatggtcttgcatatatagaattagtagatacgcacttaatacaatcagcaaacatggactgaaacgttatcattcattcaccattttccgtgtctattgcatctgccatgatcaaaacgtttaaaatgatcatcaaacctatgttgtagttttccatagaaagaacattcgaaaattttggttaaaaaagatggaaacataagtacctaagagttaagaaagcactgaagcgcagtttatatttgagtttaagcctttactacccgtcagatcaagttcccattccaaaactatattagtcccatacaatgttaaagagactactacctaccgttatcagacaatctgttagaagttatcaacttccagctaagagtggaagaaagattattccagtttacccaccagttgaaagaatatcctccccattagtagtgaagactctagctgatcatgatctaaaacaacttgacccaactggtgtaaaaacagagatggtttcaaagaaaaacccaaatcgtctacgtgcaggtgatgttcttcgtgtagtttacgattccaagaaatgcaactacgatagttttactggatatgtgctatcggtagaccgtaagccaatagtacaagacacatccattctattaagagattatatttataaaacctgtgtggaaatgagagtgccaatcttctcaccattggtagagagaattgatttgattagaagagcggatggtaagagacgcagaagtaaacattattacatcagaaacaccagattggatgtcggagatttggaagcaagtatgagaaagaagaaatgagcacattcacactatcaaacacttgctgaattttcataaaatgaaacatgtacatagaagcaattcaaacatatagtaagtaatgctcgatatcaatgcaaacccaaagacaaggaagattcaaagttgaaagagctccagagttgaaccataatgcaaggtactctatgcaggtccagcttctctaggtaaagttatttgtatcattagcatgtcgggtggatatataattgtataatctgtaaaataaaaaggcggattatgctagtccttatacctcatcaagtgcatccaataagaaaggaaaatcatgagaaaggataagcataagaaaggatttgtacgctctatctaaaacaaagctgcattgagtgagcaagttgctctattagaaatgaaaagattacaagcaattttggtccgcatttttgataatttatgaaggttcttgattggttcaaaaaagtagtggtataatgttatgaaagccgtaccagccgtctctattgaaaaaaaattgaaataagctgacattaaaaaacaaccataacaggtaaggcagcacgcccgcatttttgatctcgtggatggttgcgccacgatgcaatgaaactgttacaataatcaatgataaaaaatagatcttcttttattaacttgtcatgacatagaataatgtgagacaaaataactcaccatgaaaggtagatttggtacgttagatctgcttcatttcatttcgtacaaggcagtgctgtaaaaaaaaaacagttaatagtatatgggtcaaaattattcacaagaaggatgtgatgagggtgaaaatagaattgtacgccttgtagtgtgaaggcaatatcgtatttcacctcagctagattgaattcttcaaaaattcaatcatatttaaaaatcttggccttaactctgtcttcgttacttctgtaaccagcggttgcagccatctcttcttccttctcagcatgctccaaagccgcttgccaacgacggtctctagcctccttcttttgatctggatgtagcttttcctcgtacatagataaaccaattgaggctagtaacaaaatcacagttataccttgagcatacattcttgcctgcacagccttttgggctttggtcatgtataagtccctatcaaccaatttccaggatccatacaaggaagcagcccatgcaccaacaatgatcttgtacttattgttggacaaaccttcgaccaatttttcgctcataggcaggttcttccatctgttatgttcagcaagaatatcactggacgaagagtcaccatacattttcttatcaaaactgttagaagattcttcagcgacaatagaagccaaaagagttggaggcgtgatgaataaagcagtcttgacagaccatgtcatagcctttggattgaatttaggataacgatggggtaaaaacctgaacatagctgcagaaattaacagacctgcagctgcacctttaacaccacccatcagggtgtagtgacgatgagcatcaatttcttctcttgttaaaatcttcatcttgctgtgctggttttttcgtctttcagttacttatctcttaagctaacttttgattcccttagtttaaataaggtgataaatatcgaattaatactggaacaaaatcctaatatatcccgatatttattttagccaagaggataagcattaacaaattttaactgtcaaacgatatatatatatataatttgaaatgattctgtaaacgaataaaccgagagaatgctcttccttatatacgatacttttaaattccctccctgcctttgttccaattatactttaattttggttcgattttacttttttacttttttccttcccgtatgataaatattctttgttcctttatttctttttcctgcaatatcgtatacgatttaggatttatgattgtccatgaggcactgctactgatgttacgtaattttggcagttagccaaaccctatatctctcgttcttgttgccagcccatgaacaggctcagcgtaacctgttcattgctatcaacgtatcaatgaaccattcgattgaaatttcttccaaaggtcagacaagtttttgtctgaaaataactccgtcaattagaaagtgactatgttcattacactgatgttcaaaatcaatccatactttagcgaagctaatacctaagtgggaccagccgaacgaactgtcctactcagaaggatttgcgcgtgcatacggagatagtggttttagtagttgttacctgagaagaagccggtcggaatttgccacggttgtggctccacatttccttgacacaaagtttcctgtgatatgattggtcagtcacacatgtttaaaaaaaaaggaagagcagagaatatgcatcgactaaccctaacagctggaacctaccagattcatccaatagagttacaggatcttcgaaaagcttcagttttggacctaaggcatcggatcgttcggataatatccattgcaattagtgcagtgttgcgttcattagcctgaccttttaatacaagggagagtgattaccattttgagaaatcgccgaaatactatttttcaggtttctactcttaagaaaaagagcttaatatgtggaaagcctttgctttgaatatggccagcagagttttgtacatcactctgttttgacgtaaccgatatgtatactagcttgagtctctactgaaatacttgtaaaatgaacgcatattagactattgaagatttttttcaactagttaataagcgaacactgatacgtcatttttttttatttttttcatggatcgttttgttcgactcttcgactcttcggatattatctgacgcgcgacacaaaataataatgtgaacacttaaaaagtatgcgactttaatcatgtccctggttcgacacactattcgttagacaatgacagggttccgagttcttaaatcgtacaatttaccacaataactgaaaatggatttagtagaaaaaatgtgtattaaggcaactaacctccatccctagtcttgtcaacaatatttgcagaaagagataagattgcaagatagttaactaccagcagagaaaatattcaacagtcagaatgcgaggtatcttgactctttttgttatttggcttcattttgtttatcctgtcatatgtactgaataccttgttagcttgaagactccaagagctttaaggtatgttttcaactttaaaatcggcgggtccagtgtcaaggaattgatagaatcgaagatccacagagaattctcattcggtaagttcaatgccatttctgttgatattcctcctgttctagcggataagttgaaagatgtaccatttataagtgatgttgtggctaatgtgaagattagtttgttcgatgagttcccacaaatcgcttcaggattaaacaatgatcaatatgacttcgaaactgaagatgaggaagaggcagaagaagatgaggggagtgatacttatgaagatgatgataattacgacgaggatacagacaatggagataccgattttagcgatgacttcatctcacaatctcgagctccaagacatctagcaagaatttctcgaagagcacagttaccagtcatcgagaaagatgatacctcatctggattgaaataccattaccatgaagaacaccagggtgaaggggttttcgtttatgtacttgatagtggagttaatcatgaccatcccgatttcgaaggaagggctatgaaaggtattgatactactggagaaggctccggagatctcgtaggacatggtacccatgttgcaggtttaatcggttccaagacttatggagtggccaagaaagttaatattgttgaagtgaaggtcctagattccatgggaaaaggcactgtcacaaatatcatcgaaggattggaatatgtcgtgaaccaatgcatcggaaagaagagaaaatgtgtcataaacatgagtctcggtgcaccaggaacccattcgattttagataaagctgtttcagcagtaatcgaagagggtgtcgtggttgttgttgctggaggaaacagtggattgaacgcatgttggtacagtcctgctaaggtcaggaaagcaattactgtggctgcaatggacgatagaaccgatctaatggcaccattctcaaactggggcgcttgtattgatatatgggctcctggtgtcaacgtgaaatccctttccaataaaggccggggcacttttgtattgagtggaacatcaatggcatctccaatagtagcaggtgcagctgccatctatttggatcaaggtgcagaccctgctgaagtgagaaagatattgagtaagactgctacgagaggtgttttcaagaagagagctattgctgtaagaccaagaactccaaataaggttctctatacaggaaacaatcaagaggatgatgaatttgcttacgcagtttacccgatgattgatgagataaaattcatggatcagttaaagcaagctacaagtcgagtgaaaccgccaagtggcgagatgattaatctagtaacacatgatagaaagatacttaaaccacgattgagtaagttcctaaaaaaagtgagtaacaattcttaatatattgacatacataatatacactttgttttcgttttagagcaagaaatcgtttcgtttcgtttcgtttcgtttcaggaagacacatgcccttttattcacatgatattaatttatgagcaaactagtgatgaagtgtcttccttcgttagaccatttcgttgtaagttcgtcacaaatgctgttataatttgttataattgctagagtaccagcaaggcccgcctggagaggcagataatagaaaagaaaaatattgacgaaagatgactttattaaaatatatacaagaccatgtatctctaaacaagctgctgctttatttctagctcactctttgatgcttgatttcagatatcgacagtctcaagaatggtgtagaaaatggtaatggagtaggaaaacatgcatggcgagaatggtgctgtggtggaacatagcatgaatttgctaaaattgtcatcatattgtacattatacgaaaggggaattcaacatgcaaacgtaagataaaattggatgaaatgggcggtcagtaaatacgagacattaggggcatatttcacatttgaaacaggatcctcatgcaaaccatttctaagacccaatgtaatagtagtgtagaatgaaaggaaacgaaaaaaaaagtttatcgtgtgtttatatatccacaggtttatccttttctttctttcaacttataagattacagacttgataccgcaccatcctgcagcagcagcagccatcaaagcggatgcgtaacccattggtttcaatcctctagaagatctgaaaatagcaccagttaaagcaccagctgccactgagccagcaacatcatgcttacctctgaaagaatcgatcactgagttgatcaagttgtaagttaaggccaacacaccagcattgttacccaaaaatggacctcttcttgtgatatggtttaatactgtattcaattgcaatttacctggtgagttaggtgggatgttcttcaacccttcaatgaacccataagaaccaccaagacctaaaccaaccaagtatacagcaccagtaccgtaacataaatcgtctgtccaacctctagatggaatcaaaccttgagaaccttccattgaagaaagctgttcttcttccaaatccatatactcaacaccacgctctagccctgctaatgggtgaagctgtgatggacttaatcctcctggaacagaaataacgttcgacacattcgaaattgatgatggatcgaatcctagagtttgtttcagtttatcatcattttgttcaactggtgtagtattttcttgtgagtctgtagatgacttcttaccaccgaagagccaagacatagctatactttattattattattattagccttagtttatatggtatcggtcaaaggatgaaaaatcaggaagagattagacccggtccgtattcgacaataatgaagccctgtatttatcggagtattgccttgatagactgaaatgcaatggtaacctagcaaaataccaatacggaaaagatgtctttgtcttagtatctacaactcaaaccttcgagggtgattcaacgtatcatactactactttaaacacttttcgattgtaaaattatatttcactaatttttcaaaatttcaaaatatttcaagaactacggttttttttttcttcctcttgtttcttcttgcttcacaagagactctgtgatttcaagaccattcaaggtaaaatcaacgaatcgtacaaaatgatgattcatgtaaccggaaccgttctgcagatgtagctgacctctgttttgagcgcagcgaagggtaaacagagagaaaaaaatttgtcatttcatttagcatttctagcgacaaaaaaaatatttaaaactgacgcccgccatgagacaatgttatttcacacgacattgcaaaagttatcactgggtttccaaacagatatcaactgaggtatctttggatgaaactttacctacgcagattgatagaaatctgtaaaaaggagcgcattgcccttaaattcgtacaaagaatacaaaggaaaattggggatttgttaggaaacgacttttctgaaattatacattttcaaaccagtatatatatataaagggatccgtataaacctttcatatcaatgtactgtcgctaatgtttttttttaaaatcgcctgggataatttgtgaaagcatttcagatactaaggtagcatacatgcactaacgcatttcaaggcttcacacttttgaataaacataaatttaatataaagagtgcagttttacatgaaaaggacgctggaacatatgtcagtctgcccctcagaaaaactccgatgaataatttagagaatcatcaattttcattctctgatgatttgttacactgtgattacacgataaaacacaagctgttaacccgctttatgacgaaaagtttcacccagtgattgaaatacaaacaaaaaatggcagaacgtagtgctagagtccaatttgatttgttcgagtccgaaaaagtgttgttgcgacacaaatggatcagaatattagaggagattgactccgaagtctcagtgacgcttggatttgatctatacaatactaagaaagaggatacgaagttgcaccactgcgagttgaagaaggtgaaccaaatgagagtcggttacgacgagttcctattgaagaaaattaaggaagctggaatacaaaatgcgaaatgatttctatcaatctaaattttcattccaacagctgctcaccccttgtatgcttaacgcttttttctataccgttgtaacaatttgtctataacttaactatctttctctcatgtcagtcagtttatactatttccgcttttttttttctgacgtcttgtagtcgcaaaccacaagaaaccgcaagtcacgtgatctcaaaccctcatctatcgctaatctattctaaaatccaatcgttgcagctttcacataaataaccgctgtatatcaaccgaatacaactactccatttccttcattcaaagatttgttcccttaaaacgccaaacgttctttcagtctaaaaccaagcgcattgcggttaattgctattatctgcccagatataacacacttcttatcctaaattctgttgcataccgttgctgtcaacgtgacgtgtaccaaattgttggtacatgaatcatcttgaacgaccacggatagtatgaacttatgggatctttatgaaatgttctacagaaaaacaaaaatccaacaacgatcccaacaagttttcaaactttttctttcccaaaaaaaaaatagtgctatgaaatttcaagtatggtgaaatcaccacatcgtttggatgaaatgcctagactgggatgtagaatggatagaaccaagttttttttttttttctcttctcatctttttgtttgttttgttagtttagttgaaattttgtctagatgaagtgaaatgcactcggcggctttttataaagaagaggttttcctgctatttttttcaagcaaaggggtttaaataaacttcgtgaatttaaattatatcaattctctaaatcttcttaggtttttatacattgtattttctgtctttctgaaacctcttgactcactttcaattgatcagtactctgtggaaactcatcaagagaaagggctaactagaagagataagatattttaaagatatccaaggaataattttagtttgaaactgaattactcaatatacacaacaaacaacaacaacaacttgtattgagaatatttatttgttcatcctatcatattcattctgatttcctgttaatattgacaataggagtttcacacaattaaatctgtccctttttgagtacaactattactaaaaggtcatcagccctctgacaattaatatctggatattgcgtcaattgtattgaacgcatttgcctagtaatactatttttttacccttcacgattttaattttgaggttataaagtttaaagagacttttttgtccgtgaaaagatgtatgtataaactaaactaaactattactaataatgaaaacctctttggagtttattttttgacaagttgagattgacattggaaacaaagaattactggaaccgccttactcctctattattacttttcaaccaattgtttctcagaagattttatcttaatatcagtttttgagaaaatgaagattgttggggaaaaaatacgatactgcatattttgaaattttgaaaccgtttccttttgtacacgattattgcgctaaggtttttcaatgggttctacttgttcgtttttgaactttattttttggttgaacgaaagttgaaaattgaaaatccaatgtttttatgcacaattgaggatggcgactggtaaacgacagaagcatcaactccatttcgtctagtgtatgtgtgaaacctgtcatctgtgaagaataggtatattgtttagcaacgagaacaactaacgttggtattccttagaaagcgaaactgatagtgtggctagaaaatccccacattgttcacatctttcaagccttcgtttagtactacattgttcatcgcacaataataatattgccgataatctcataactgcagcgttccacagcaatatataggcatatgtgaacgatttttgccgagttacagttttattttcagcccacattcgatattacatcactgttccccttcattgtctgtctgctgtcaaaaactaaaacttcatagaggttaaagaaagttttgttaaaaagagtaagcataaaccgaatagtacgtttgctagtttctttttttcagaaactttctattattatcattattgtaacattgatcaaattgactaacttaactctttacagactgttcccggttttagctagacattctcggttcattccgctcgccaacaaatttacagttcattttagcatattttcaccaagactattccattctacacgcaatatattaagaagcaaaatgagtgaggaaaatctttctgaggtttcaatctctcaaagtaaacaatacgaaattactgaatatagcgatagacattccaagttggcttctcatttcattggtctgaacactgtggataaggcagatgattctccattgaaagagtttgtcaaatcacatggtggtcatactgtgatctcaaaggttttgatcgctaacaatggtatcgcagccgttaaagaaatcagatcggttcgtaaatgggcctatgaaaccttcggcgatgaaagaactgttcaattcgtggccatggccactccagaagatcttgaagccaacgcagaatacattcgtatggctgatcaatatatcgaagttcccggtggtaccaacaataacaattatgcaaacgttgacctaattgttgaagttgccgaaagagctgatgtagatgcagtttgggcaggttggggtcatgcttcagaaaacccactactccctgaaaggctagccgcttctcacagaaagattatatttattggtccaccaggaaatgccatgagatctctcggtgataagatctcgtccactatcgttgcccaacacgctaaggttccttgtatcccatggtctggtactggtgtcgatgaagttcatgttgataaagaaactaacttggtctctgtcgaagataaagtataccaagaaggttgttgttcgtctccagaagacggtctaaagaaagccaaggaaattggtttcccaattatggtcaaggcttccgaaggtggtggtggtaaaggtatcagaaaagtcgaaaatgaagatgagttcctgtctttgtaccaacaagctgctaatgaaattcctggttctccaatttttattatgaagttggctggtaaggctcgtcatttggaagttcaacttttggctgatcaatatggtaccaacatctctctatttggtcgtgattgttctgttcaaagacgtcatcaaaagattatcgaagaagctcctgtaactatcgctaagccagataccttcactgaaatggaaaaagcagccgtcagattaggtcaattggttggttacgtttctgctggtaccgtcgaatatttatattctcatgatgaagacaagttctacttcttggagttgaacccaagattacaagttgaacatccaaccacagaaatggttactggtgttaacttgccgtctgcccagttacaaatcgctatgggtattccaatgcacagaatcagagatattagattgttatacggtgtcgatccaaaatctgcatccgaaattgactttaacttctctacacctgagtctgctaaaactcaaagaaaaccaactcctaaaggtcactgtactgcctgccgtatcacatccgaagatccaaatgagggtttcaaaccatctggcggtgctttacacgaattgaacttccgttcttcttccaacgtttggggttatttctctgttggtaataatggtggtatccattcattctctgactctcaattcggtcatatcttcgccttcggtgaaaacagacaagcttcaaggaaacatatggttgttgctttgaaggaattatctatcagaggtgatttcagaactacggttgaatatttaatcaaattattggaaaccgaagacttcgaagacaataccatcacgactgggtggttggatgatttgatttctcagaaaatgacagctgaaaagcctgatagaaccctatctgtcatttgtggtgccgctaccaaggctcatattgcctcccaaaaagccagagaagattacatctcatctttgaagagaggccaagttccaaacaaatcattactacaaacaatgtacccaattgaatttattcatgatggtatgagatatagatttactgttgctaaatcagccgacgatcgttatactctattcattaacggttccaagtgcgaagttggcgtaaggaagttatctgatggtggtttgttgattgccgttggtggtaaatcacacaccatttactggaaggaagaagttgctgctaccagattatcaatcgactctaagacaactctactagaggttgaaaatgatccaacacaactcagaactccatctcctggtaaattggtcaagtttttggtcgaaaacggtgatcatgttattgctggccaaccatatgccgaagttgaagttatgaagatgcaaatgccattgatttctcaagaaaatggtgtcgttcagttattgaaacaaccaggctctactctggccgccggtgacattctagccatcttaactctagatgaccctagtaaagtcaaacatgctaagccttacgaaggcatgctaccagaattgggtgctccaatcgttgaaggtaccaagcctgcatacaaatttaaatctttggtcactactttggaaaacatcttgaagggatacgacaatcaagttattatgaatgcttcattgcagcaattaattgaagtgttgagacaaccagaattaccatactctgaatggaaattacaagtttctgctttacattcaagattaccacctaagttagacgaaatgcaagaacaattggtcacccgttcattcaagagaaatgcggatttcccagcaagacaactagaaaagatgttagaagctgccttaaatgatcctaacgttgacccattgtttagcactaccattgaaccacttgttgatattactacccgttactctaagggacttgctgctcatgaacattttgtctttgccactttcttagaaaactattacaatgtcgaaaaattgttctctgggccaaacattcgggaagaagacgtcatcttaaaattgcgtgatgagaaccctgacgacttggagaaggttgttttaaccgtcctagctcactccagagtatcagccagaaacaacctgatccttgccattttgaagcattatcaaccgctatgcaaattgagctctgaggtagccgctgctatcgaacaaccattgaaacacatcgtcgaattagaatctaaggccaccgctaaggttgctctacaagccagagaaattttgattcaaggtgctttgccatctatcaaggagagaacagatcaagttcaatacattcttaagtcatctgttttaagcacttcatatggttcatccgaaacgaagcgcacaaaacctgatttagaagttttaaaggacttgatcgattccaactatgttgttttcgatgtgttggcccaattcttgacaaatccagatgatgccgtttctgctgctgctgccgaggtctacattagaagagcatacagagcgtacactattggtgatttgaagcatcaaaagtcttctggatcacctgtagttgagtggaagttccaacttccatctgctgcattcacctcattgccacaggttaagagtaaattgggtatgaacagagctatttctgtctctgatttgacttatgtctctgacggtgaaaaccaaccattaagaactggtttgttgattcctgctagacatctagatgatgttgatggtattttgtcgtcagctctatctttaattccttctcatcatatgtctactggccctgtcccagacagatctggctcttcagccagcttgtctaatgttgccaatgttgttgtgtcttcaactgaaggatttgaatctgagtcggatgttttaaagagactcagagagatactcgatttaaacaagcaatcattagttgactctgctattcgtcgtattaccttcgtgtttggatacagtgatggtacatatccaaagtactataccttccgtggtccaaattacaatgaagatgaaacaattcgtcacattgaaccagctctagctttccaacttgaactaggtaagatgtcgaacttcaatatcagacaaatatttactgagaacagaaacattcatgtctatgaggccgttggtaaaaactctccggttgacaagagattctttaccagaggtattatcagaacaggtcgtattagtgacgacatttccatccatgaatatttgacttcagaagctaacagattaatgagtgacattttggacaacttagagatcattgacacttctaactcagatcttaaccatattttcattaacttctctgctgtatttgacatttcgccagaagctgttgaagctgcctttggcggtttcttggaaagatttggcagaagattgctcagattacgtgttgccgctgctgaaatcagaattattatcaaggaccctcaaactggcaccccggttccaatcagagcgttgatcaacaacgtctcgggctttgttgtgaagactgaattgtatacagagatcaagaatgcacaaggtgaatggattttcaaatctttagataaaccaggtgctatgcatttgagacctattgccactccttatcctgcaaaggagtggttacagccaaaacgttacaaggctcatttgatgggaaccacatacgtttacgatttcccagagctattccgtcaagccaccgtggcacaatggaagaaacactctccaaagaccaagttgtcagacgattttttcattgcaaatgaattgattgaagatgaaaatggtgaattaactgaagttgatcgtgaacttggtgctaataacatcggtatggttgcattcaaggttactgcaaaaactccagaatactctcatggccgtcaatttgtcatagtcgccaatgatatcactttcaaaattggttcgttcggtccacaggaagatgccttcttcaacaaggttactgaatatgcaagaaagcgtggtatcccaagaatatacttatctgccaattcaggtgcaagaattggtattgccgaagagcttgttccattgttccagattgcttggaatgatgaaaaagatccagcaaagggtttccaatacttatggttgtcagatgagtctcttgaagaactcaaatctaagggtaaagacaatgctgttgttaccgaatgtgttgttgaagaaggtaaggtcagaaacgtcattactgctattatcggttcggaagatggtcttggtgttgagtgtttgaagggatccggtttaattgcaggtgccacttcaagagcgtacaaggatatcttcacgatcaccttagttacttgtaggtctgtgggtatcggtgcttatctagtcagattaggtcaaagagccattcaaatcgaagcacagccaatcattttaaccggtgctcctgccatcaataagcttcttggtagagaagtttactcttcaaacttgcaattgggtggtactcagatcatgtacaacaatggtgtttcacacttaactgctccagatgatttggctggtgttgaaaagatcatggactggttatcttacattcctgccaaacgtgatctaccggttcctattttggaatctgaagataaatgggacagaaaaattgactatgctccatctttaaacgaacagtacgatgttaggtggatgattgcaggtcgtgaatctgccgatggtttcgaatatggtcttttcgataaaggttccttccaagaaaccttgtctggttgggccaagggtgttgttacaggtagagcccgtttaggtggtattccattaggtgttattgccgttgaaacaagaattgtcgaaaatttgattcctgctgatcctgctaatcctgattctaccgaaatgttgattcaagaagccggccaagtttggtatccaaattccgcgttcaagacagcccaggctatcaatgacttcaatcatggtgaacaattgccattaatgatcctagccaactggagaggtttctctggtggacaacgtgatatgtacaacgaagttttgaagtatggttctttcatcgttgatgcattggttgattacaaacagcctataattacatacattcctccaactggtgaactaagaggtggttcttgggttgttgttgatccaactatcaatgctgaccaaatggaaatgtatgctgatataaactcaagagctggtgttttggaaccagaaggtatggtcggtatcaaataccgtagagaaaaattgttggctactatggcaagattagatgacaagtacagagagttgaaagccaagttggccgattccactttgactccagaagaacatcaagaagtatcaaagcagcttgctatccgtgagaagcaattgttgccaatttaccatcaaattacagtacagtttgctgacttgcatgatagatccggtcgtatgttggcaaagggtgtgatcaaaaaggaattggactggccagaagctcgtcgcttctttttctggagattaagaagaagattaaacgaagaatatttgatgagaagattaaataacgagctaggatctgcttctagactagagaaaatggcaagaatcatatcatggtacccagcttctgtgagccaagataacgacagagaagttgctacttggatcgaagaaaactaccaattcttggatgaacaagttaagagtctgaagttggaagctttcgcacaaaatttggcaaaatctatcagaaacgaccgtgaaaattccatcaatggtttggcggaagttttgaaattattgtctgccaaagacaaagaaaagcttcaaaaagctttggaatgatgaacttttaataccagtttaaattagccaattttctctcttcatagaggttttagtatttcatgtcaaaaggactctcaaaagatattagtgcttcagttttttctgttgttgtttgttgaactgatgttacatgagtgcctttagaggtccttatgctatgacacatacttaacgtgtacaatatatatatatatacgagctaataaagatatgattgatatatgtgaaacaaatgaggaactttgaggaattaaagtctggttatattatccagatttcattttcttgttctgttcatccgatgtgagttctgaagctctttttcagtcagacgtcttcgtcgatttgagattgttcaatctctgtttctcagccatttccttttcacgttcttggattaaaaatggtattggatcattcaatgcaccgccactagaacctaattgctgacaaacatgtgcaaagtcagagagtttacggcattgtgtaaagtattgatagaatggagatttcccgggagtcattctattcatcatatatttaacatttgcaggatgatggttgtattggtttgctatatccaggtattcttttaccgctttgaaccatggcaatggtgattcagaaaaaactgttggatttctctcagcacaatccgccatcataccaccaatagttttaggtaggttcagatcacttcgtagctgttcgaaatgttccttatccctgatagcaccgttcattattaacgataccttattacgttcacatatttcatatatttttggaatatatgcccggattggagattctctgtttctcatcggggtagttctacaatgaacagttaagttcgtgataccagttgcacataatttttccaccaaagtcaaagtatcttcttcatcttttaggattctaatcttcacggaaataggtttcccataaatcttcccaactttctcaactaactcaatcaaaatggagcataatttatccggagtctgcaatagagctgcacccattccagaatgaatggagaaatgtttaggacatcccgcatttacatcaataccagcaacatcctcaataaccttgagagcggcttcgacagcgagcgatggagttgatgttccgatctgaaatatgagttttccatgctctacttctggaactgtcctgaaaaccacaccaggttccgttccctcccgtttggcaggaataataaaatcgacagtcttcaatgtatcattaacctgtctttgacactgtataagtttcttgtcaatgatttctggggaccagaccaaatctgcgccgtgcttcaaggccaacaatctcgttggcagttcacctgccctgaccataggcgcaagcactaactttcctgcatattgtaccattttaattaccacgataaatccactaggatcctactctcagaagcgtatatagtctacttgatatcacttgatttgtcaaagctcatcacatcttgtcatacctcatcgcatcttgaatcaacattttttttcttcatttcattccgatattcaaaagtcacgtggtaccgtttgattctgttagatgcttcattccctaccgatagatcagctattaagatatgtgaacattcaacacaggaagacaacacatatattatgaaacaatacgacccaaaatattctgtagtgcattctcagcctcattggttgtcataacacttcttcatgtccagttggtaaacaaacacaaaccgagatattttgatccaccttgctacacctccaaaacgcgaagtttcaaatttccttccctagcagcttaccttagttacgcgagttcagtgaaaaaaaatgcctacgtaataaaaattcttattgcaggaccagatctgaaacatatttgaacggaatgcaataactgcacaaatagttcacggtatgaacgtttaacgtgttgtttgttttgatattaggttatgttcatgtcggtatataagagcttcatctaattgggttcgtaatttggtggttgagacaagatagatcagataactaacgctcattgaaccgattctaaaatagaagtcaatacaggaatagaaatacataccgagtgagatattatgttaaaagtacttagaaaaatatccggccattcaagtgatgctggtagtgagaaaccggcttctgctagacggaaagatgtaaataaggacctaaggaaaccgtatgatccgcaaacttcacaatacccacgccaggctcctgggaaagcacctttaagacctggcaagccacaaggtggtaacggtgctaaaccggaaactggtgtaacaggaccatcgtcaatctcttataataagcaaagacagaattattctgtgctggggagcagcaatgacagtaatgcgtcttctcatggatcaatgtcatatatgggtaaagacactcacgagagcttaataaaacaaaatcgagtcaacagaaaaagaagtgaacattattacatttatgactttgaaaaatataggggacccacggatgagaccattgcatcagatcccgattatgacatctttcaaatcaaagatgggatcagtgcgtcttctgctagatatgttatccattatttgacaaacaatttcaaagaacagctgttgaacagattttcccaccaaaataacaatctagatacggatgtgttgaaggcctcgatggaaatctttaagcctaatttgtcgcatttttctagctccgagatacaccattgtaaaaaaataataagatctttctttccttggcaaggatgctccttaactggaacagcgcttgaaaaagcaattgctgaacattacggggattattcaaatccaaagcattggacgaggttgatactgtcactaaggattatatggtctcacctttcccatgggattgtgccatggaaatgctatcaggatttttgtcagcttgaatcaaggaacaattatcctacgatgtctttttataaccttttacctcaatgtcttcctaatcatgattacacttgcagtacgttcgagtttttagaagtactagtagctattatttcgaagattgatctcgtagttgacaaaaacgcacaaatggacttaattttcactgcgggacaggtatgctttgtaaaagaccaaaatctacaaagacatttacaggataattccaagaatgatccggatttgatatctctagggaaactgtattatgctagaggtactgcgttacttcatttgttcgtcgcttatttgagatctttggcggaggaaggaaagatcaaagacttttatctcattgataacttccatattgacaattatccaccacatccatataaacctgtggcacaaactgccttaactttgactgttccgtcttttattgacggcgagaacgactttaataccttacttaaaaatgcagcaaaagcacaatcgagaatatattcttccaaccattccttctctaagcaagagaatgcatttttggataaattcgaagaaggtccatacaaagtgtttgataccctattctccagatcatcaaaacgttacctttacaagtttgataagaagtttgatccaaattctttaaaactctcaagtgaatctgggatgcaacaaggtttaggaactataggcgaaaacgatcaatatgccgtagcaacatggattgaacattgtaaaggtcaagattttagtgaatttttaaacgtgttagacgatagcggtcttggagaaggaacgttagcgttcgaccatacttctttcaattttgccgctaagaagcaaagtcaaaaggaaaacttctcgcctgtgagagtttctaaaatggctttgtctgaatggttcatttcatcatggaagtacgaaaccttccttcacaaggtgcataacaccttactaatcaagctaacaaaacgagttggtgattgtgactggttagttctaagtactgatgaaagagtcggtaagtcgagctacctaactcctccctcttcgagtgattctgcaaaagctcttgaaaatgtcaaaatcccggccattgattccgataatgcatctattaaatctcgtcccccaccaccaaaccttttgggagataaatcttcgtcaccattattggattcgccaagttcttccttgtactctagcgtcttaagaaagcctgtaaaagaaggtatggggtccgaacagaaaaatccctctgcttataaccgaaactctaagatgagcgttgttactgcggctcctccttcctcggtttcaagaagagaaataatgacacccgttgaagataatacccaaagtgtctttcaacatgactatcccaataatcaccacctgcctcctgtcatggtgaaaatcaataacccatctttagtagaccttgacgctaatggcaaaacttacactccatctagatctagaactcttgcacccgctgctacaccagagcaaaatatgaatatagataaatttggttcgatgctgtctgatcagcaacgcctcgttaaaccattggacttcagtgttaagataaaatcaaccgtcatagaggaagaagattcccattcaactttgcctgaggatgatggattggaggttgacgaagacgatagtttgataacgacaaacacaatacaaaagcttaaagcacaactctccaatatttcatcggatgaagaggaagaagatgcagtggacgctgaactggaaacaggacaagaggatgaagaggagcaggaacaggaggattcaacacaacacatggactctttagaagtccaaaatgtggttgacaatgttatagaaacgaaagaaaacccatgtacggatcgtcagttttcagttagcgatgcaaactctaaaagtgatgttcctgccttgcagaacgaagaggtatcagttgacactgcatctatcgccataaattctgtggaaattcccagtacaccggctaatgatacagaaacttctctatcatcaaaggaagcaaatattgaggaaagtaaaccagagaaaattcttgaacaaggttttgaaagcgccaaaccactttctcaggatgagcaaaaaagggtcagctgtgatacagcaggttcctttcaggatgcatctagcgtgctgataagagatgatagtagtttaaactccgaaacgcacaacacaggtcaagaggatcacaatcaatcatcagtagcaactacggctggatctgctgtgaccgaaaaacagaatgttgatactgaaattgggagtgacagaaactccaaggcaatatcagagagtgacaaaaacgatgaagcaactagcaagagtatatctctgactccaaataacaggcttatgcgagcctctgctcttatagaaccacagtcttctccaaatgatatactcaatgacctgattgataactacaatgcagaaagtttggtcactgttagctcagagggcgcgactttgttcgaacggataaaaagtcaaatggaaagggtaagcaacggtaaagatctgccgccaattccggccacgaggccagtcctgcataaactgaaaatggatgttgtgaacgaagaggataatgatgatagtccttcatctgagagcctacccttagtgactccaactaaaggtacagcaacgataatgagcggattttcttacaatgcaacacctccgatgaaacaggaagagttcaaatataatggtaagctgacttttccccaagattctgtaaacactttctattcatctttggaccacgacaccgatacgaatgatcacgacggacaagaaagtgcaggcaacggcgacgaatttctttccattgaaagcgcggacgaaacaacggacattaacgaggaaaacaaggcattcaggaatgtcatgctaaaaactaagaaaagctttaaaagcttgaaaaataaatcgttaagggcatgagtagactatataatctacatctcgtatataagatttaatctcttattaaaagaacagaatccgaacaccaagtaccagtgtatggatgcatttgaagttaagtagcgagcggaaccatgcaggagcggcaaaaggaatccttgcattctaaagcgatcctcgaaagagtaaaaccttaatcggagctttacaggttttctagtgatatttgccgagagaagtgtaaaacatgttgacaatcataaaagaagagtacatgtgcacattcacaggtctaaagttcttagggtatcaaaaaaaaaaaaaacatttcgacaaagctggagcaacataatctcacttgttcttagacttctttcatactgatctgtaacgcggtttctggaacttgaccgctagagaattccttctatggtgatgatttgtgcatggagaagacaaatcgagtgaacattgcgaagaatcatcttcagtgcatttggtggggaaatcgatcttgcatgcgtgcattgaattccttggagaaacaggttgtttttcagtaatggaccttgattcagaaggcgaattgctattgtattcgtcattatagtcgtaatcgtaattgtagtcgtaatattcattgctagttttttgcttgtcatcattatcctgattgtccgctagagttagcgaacctgtattttcagagtaactggtattatctacactgttctccatgctataatgctttctgaaggggttttctggggtaaattcagacgtctctgactccattaacgtaggtaacacctcagaaccaaaacccaagccagcacttgagcaagaagccgttcttcttgaccgacacttgagcgaaggacttgacaatgtggattctgatgcgggacgctggattgaattctggtgatgcccctgctgttgttcgcgtaactctagataatgaccagggagtcgtgtcaaattactttcgctgaatctccgtgcacaagcaggaacatgtacaaaccagtcgtcatgatgatgataatgacggctatgtacgcactggtacaagtcgcagaccttcatgtttttggatatttccgtttgcaaggaaggattctgagactcctcaccaaatgcgcatgcgttaagtggttcgaaatcgtccactccgtcaggatgctgttgaacccgcaacaacgtcccaacgatctttgaatcacctggtttcccgttcttagaataatgtacttccaactgtgccgtaataggtctattcgttcgatgctgatccatatcgtttaaaaattattactatgtcgcaatcaatccttgtatattatctgggtattaaaacatctgtatgacgttctttactctcgttgcacaattctaagaccgatctaccataaatacatattcaaatatctaataaagtcgtcgcagatcatcagaagttcacatttatataactcataatattctgacgccatatatatatatatatatatatatatgcatataggcaaatattattgtcatgtatacagatagataaacgatcccacagcaactcaaaactccacaaacattaaaaagtgggagaccattccagcaaaccggaaagactacggaaaaattatcttgaaacatactttgtcgacagcaagtggctaaaacgccaatgcaccaaaacatataattcaatacacatacacacttttagtcttacattatcaactgtaatattgtcacaaaatacatcatagatgcttagtagatgcttaaaaatgaaaagagtctggacttcaaccccagttcgtctttcttatcttgcttcgttgcctgaagctcgtatattccttgctgctgaattgaatgaatgatccagttttgctggcctgatgccggaaagcaagccgtaatagcaggctatagctcttctgacttccttaatggatggtatcatcacaatacgcgcagtcaccccattttgcagttgcgattttcgtttcatttccctttttcctttttttccctaattttccaaagggaggggccttgtggagcttattttggtacataaactgcatagaatagtgcgtagggaaatttcaagacgatccattttctgatccgttcctggtttcgaaatacttgggggccgtgggtagcagcaatcagcgaaacccatggttattatatttttacgagaggtaagttggtttgtgtcacgtgtatttttacccggccacgtgttttcctgcgctttccctttgtctcgctggagacagccaagtaatctacgggaagcatttatatagtatgtattattattatcacaatgcgaataatcttaaatcacacggtggtttatttaactttgtacagggcttccctttcaataccaccaggatacaaatatagcaggttttgtttacagtcgataaaagtcaggagagcttttttcaaactggtctgaacagggtcataatctcacagtaacaagcacacaaaatataagctttggattaatttccccccattgttactgtttctgcgtttggttccaccgtttgaaataaacgaagtactgttccaatatgaagttctctcattccttgcagttcaacgctgttccagaatggactaccaaatatattggttattctcagttgaagaaattgatctatacattacaaaaggagaagttgtatagatccacttctgaaagttctgacctggaaagtaccccactgactaccgctgtcacgagggattcttacgaacagagatttatcgatgcgttggataaagagttggacaaaatcgactcgttttataccatgcaggagacgtcgatcttggccaattactctgaagtgtatgaagacgtgactacgttccagaatgaactgatgaacagatcgatacataatacaagcactggtgatctgaacagacagggaacaaggcgatcatcttctatctctgaatacaattcacagccagaaatggatctttattctgaggaagacgatgacgaggacgggttttccattggaaaccaagagcagtctgatggtcagaataagcagatccaggctcgaagagcaagaactggttcagtaggatctaggctcatgcattccattaccagtgaaatacttccaacgctgtccagggtaactgatttcaccactactgatcctattatggaacaacagattactttgaagaagagaatcgttgcctgtttcactcaactttcagaattaaaatcttttatcgagttgaatcaaactggttttgccaagatctgcaaaaaattcgataaatctttggatagtaatatcaagaccgattatttaaagagtttatcaaagaaatcgcatgtgttcaatgaacacaccattgagaatttatctaatgacatcaatgaagtcatagtcatgtatgcaaaagctattggattaatggaccctcaacatgaggtctttaacttccaagaagctgaaagagagctttcccttcatttgagagaacacgttgtgtgggaaagaaacactgtgtggaaggatatgatgaatttagaaagaaaggctcaaaatgtcaaagctgaaaaggctctgaagaaagcttctactgttaccttcagaagtatcacgaaagatacggaaggaaatatcgaattgttagactcgaatgaactacaattccctcagacagtttctgaagttttcaaactatctcctctgcaatttataagcttgcttatttcttcaacacaattgataaaactgatcataattacctccatattcgtgacattgttgtttatatctccaatgagagacactttgcagaagaactgtttggcaatcttgatttacgcatctttactttgggcaacagaaactatacctttattcgttacatcactcttagttcctttattaattgttgttttcccagttttaaaggatacaacggatggacacatactaaacccaacagaatcttcccagtatattttgtccacaatgtggtctagtgtgattatgttattactaggtggttttaccttggcagcagcactatctaaatataacattgctaaggttctatcaactcacattttgtcgtctgcggggacaaacccaaagattattcttttgacaaatatgggtgtggctttgtttgcatcaatgtgggtatccaatgtagccgcgccggtattgtgttattccattattcagccattattaagaactttgcctaaaggcagtacatttgcaaaatcattgattttaggtattgcattggcatccaatattggaggtatggcatcccctattgcttcccctcaaaacatcatttcgataggtatgatggatccgccaccttcatggggccaatggtttattgtatcattacctgtttgtgtcatttgtatcgttgtcatctggtgtttactacttttgactttccctccggacagcaatttgaaaattttgaaatatcatccaatttcggatccattcactgtgcagcagtggtatatcacgatcgttaccatactcacaatcgtattatggtgtttagctaaccaattgaaggatgttttcggagagatgggtatcatttcggtcattccaatgttgttgtttttcggaactggtattttagattctgatgatttcaacaatttcatgtggactattgtcattttagcgatgggtggaactactttgggcaaagctgtcacctcttcaggcttactctcaactattgcatcgataatcaaagagtcaattgaaactaaaccggttttccaaatcgtattgatattcggcatcgtcatattgactatggctacttttgtctctcatacagtcgctgctatgatcatcgtcccattaatgaaagagatcggatcaaatctacctggtggagaccattcaaggttattaataatggttgccgcgttcctatgttcagcagcaatgggattacctacttccggtttccctaatgtcactgcaatttctatgattgatgatgtcggtgatcgatatttgtcggttaataactttatcaccaggggtgtgccagcaagtatcgttgcatattcagttatcgttactgttggctatgccctcatgaaagtaataggatactaatagtcggatatctgtattaattttctttttttaatatttagtatgttcttatatttggcttcattctattactggtaaagccgtaaacccttacacttccttagttcctttcaatgacagtcgataactggtaagaatttgaaactactacaattgcagatacttaggggaaaatattagttatgcattacaaattaaaaaaaaacaacaaaacaggaaggactacttgcacccaaagtaatttgaggcaacgaaccgctttctggcccaattacattgattagttctgattttgtcatcggaaataatttctccagcgtatatttcaacttgattattagtagcattaactatccttctaataccggtttctgtcgctagataaactacaaccttaatcttcttgagatcaacattgtggtcagtaagaacttggattgccatgattatcgctgcacctgaaattatctgcgcatccatcagtagcacttggttataattttcgatcattggtggaataaataaactgtgcaattgtggttcccctgttctggaatcggattgaataagtagcttaccaactgcgacgctaggaattgtctttcttagagatctcatgaaacagtcgccagatctaacaatatttatagctgtgacacggtcaaagtcaacaaaaactggattatccaactgttttcctgtcggcgtaataactttagtcgttttcaatttcgtaggtatatcgtccaatgcaaaggataaaagtattgttgctaacctgtcaaaatagaatacccagtcatctcttgaaacgcttttgtctaacaatatagtctgtagagccttcacctgattagtttgtctcaacttatgaattatatttaaagaatcaatcgacacagcgtatgactcgagcttttgaagttctgctaaatgctgctgcgatttgagctgcaatttagactgaatgtgattaagtaacatctcagtcgcaatgctgttatctgacatggatgggatgattgcatctgctgccttcatggttggtttcacgaacctatccgcatttggtttaacaaacttctcccattgtcttatgcaaccatgcaagtctctcccacgagagatgatatcccttgtcaatcttctagctaaacatatatctaaatctgcatccacgtaaaccttcaaatccattaaatcaagaagtctttggtcatataatgcgtaaattccttcaataacaataacactcgcaccatagatggttaaaaacttatttggaattctatcatgatctgtgaacgaataggttgggattttcaccttcttaccttctttcaaagacaggatacattgataagctagatccaaatctattgaatccggtttatcgaaatcgtagttattttcgaaagcctgctttcgttcttcgacggttaacggtttatagaaattgtccaacgatattaatactgtccatggagtgttgattcttgtcacgagtttggtagcaacactcgtctttccagaacctgaactccctccaataccaataacatacggtgttgtccaaggtggtatatagccagaagagttcattctggacgccttgcaagcgttttatgaacactaaatgtcctatgcctggaactgtctatgtctgttttctgattcagataatgtttatctggaaggtttctatcagtcatttggcatagttttcaacatttgatattgcaagaaagccactcgatgtacctttcacgattagaaactaaaggtgagggaagaagaagaaataagcgctacgaaatcaggtagaacgctctcgcagcataccgaatcgcagttcatactatgggaacctcaggtgatgaaaatggtactaaacttacgggatcaggacagcgcagagcgaagagaacttatgaaagcatagaatcggtaaatgcaaatactaactcattctcacctgcagatcaagttttggacagtagcccggacccttcattgaaggatggtaaggctcattattcggttaactcgattaagtcaatggttgagcaaaaagttttgactaagagacagcgttctcagttgcactggctggttaaagatcttcagattttagaagatgacataaaacgttatggttggaataacttaactgttagtgaacgagaagagatatcgctgaaaagagagctattgaagctcttaaatgaaactggaaaagactatgctgaaaatggagatacaagtggattcaaaatgcaagatgaggtcgcatcaaagaaacaactattgaccgccaaacttcgaaacaaaaccgatagggtgaactgggaagaggagcaaatgaagaaaagtgtaattaaggcagatgcagatgaaatcaaagttaaggattcagataattacgaatttgtttttgatcctgagtccatgattgattttactgatgatacgacagatattttagaacctgttgaagacggtagattggctgaagcgttagaagaacaaattaacaagatgaagagtattaaagaaacgaggaagtcattgccagtttatcaatatagacaagaaattttggatagtattcggcaacatcaaattttgattgttgttggtgaaacggggtctgggaaaaccacccaacttccacagttccttgtggaggatggttacaccaacgatggaaaatgcgtggtttgcacacaaccacgtagagttgctgcaactagtattgcttcaagagttgctgatgaaatggatgtaatattggggaaagaagtcggttataatatcagatttgatgaccgaacaacgcctgataaaacaatcttaaaatatacgacagatgggatgttacttcgagaatttcttaatgacccacaactatcatcgtatagtgcaataatgattgacgaggctcacgagcgcacgttatctacagatattttgttggggttgctaaggggtattttacaagacagaaaagatcttcgacttataatttctagtgcaactatgaatgctactaaattctccaagttcttctttgattgtccgatatttaatgttcctggtagacgctttcctgtggatattcactatacacttcaaccagaaggaaactatataaatgctgcgatcaccaccatctttcaaattcataccacccaaaaattaccaggtgatattttggtatttctaactggtcaagaggaaatagaatcgatgcaaacaaaattacttgagattctttccaagcttgataatacaaaatttccagatctcttggtagtacctatatatgccaatcttcctcaagaacaacaatccaaaatttttgaacctacaccgaagaactgcagaaaagtagtgcttgcgacaaatattgcagagacatcgttaacaattgacggcataaagttcgtggtagatccaggttttgtgaaggaacaatcctattcaggaggagtttcaaagctagtgacagttccatgttctagggcatctgttgaccagagagcagggagagcagggagattgggtccaggcaaatgttttagattatttacaaaatggtcttactacaatgagcttgaaaaagtaccaaagccagagattttgagaacaaaattgaatcaagtggttctacttttgctttcactaggtatcaacgacttacttcactttccaatgttggacaaaccaaaaactatccagctaagcgaagccctcgaaaatttgtatgccattggcgctctcaatagcagaggtgcaatcacaaaagtaggacaagttatgtgtgatttcccatgtgatcctgaatatgccaaggtaatatattctagcgtgtttgaagaaagctgtaatggtgttctacctgaaattgttacgattgtctctatgcttcaagagagcaactctatatttgtaccgggactcaattcggaagaaaagacaaaactttttgggtcattgatgcagtcaagtgaccacatgctatacttgtggatatatgaacaatgggaagagaatggatactcacgaagatggtgtcaagatttcaagttgcaacataaaacaatgaaacgagtattgaggatacgacaacaattatggaaatattgtaggaaacaagattttctgcttaagcatgaccaaaaccttactcaactcaaagaaaacatgcctcgttccgtcattgaagcaaaaatcattaaatgctttatatcaggatttccaacaaatatagcaaagctctctaaacaaggctatactaacataaagcaagatttatccgtcagcgttcacccatctagtgttattttcaaccgaatgaaacaagaaggaaaaccaatgaaatacatcctctatcaatctttgatgcttacaagtaaagaattcattagagattgtataacatttgataaatacgaatggctcactgaaactatgccacatatttataaatgaatctttgtatccccagttaattgaggagtaacatatgcaacattttctaagaagcttttcagaacatcacgccaaattgttggcgagtccacctatgttctgaaaaaccaattgtagaataatcgaaatcaaatcagttatttttctaattacttctaatgttcaacaatttgctagcttccgattcaggtgttagtatagattttttgtactttcttcttctgtattctaagggattgagataatgcgatttatggatagttattcaataaagaattcctgaaattcagtgaaagtttaaattgaacacgataagcattaaatcacactttaacacaaaccacactaaaagataattattacaacgatgtgacttacctccaagtataactagtgcgttgaacgctaaaggcgggtaaaaaatgagtctgttgcctgaagttttctgcaggaagcgttcctatcgtatgaaaatcatgcataatgatacagttctcagaaaaaacagtacaaaaacccagtttgttcagttttaggtttattttgcgagagtcgcaaagcaaagtttctgactactcttctaaatattagaaaattggaatatgtcgctttgaatctgtatttatctttgttcagtttccagctatcttccaccgctgtggatactgatatctacattctacaacaccttcaacattcagctgaacagaagggaaaatatactgagatatatcaaaagtacatccagtctttatcaagccgttctaatttgacaagataatcaacttagttattcttttcggtatatagtttaaactgtttcgccaaataaatactcttgtatttattaaaagaagaaatatcagttagactttagtaaagcttaaagttgagtgagtattttttcattagaaaagagtgagaaaagatacaaagtgagataccactatgataatgagtaggggctcgaatgcaatcagaatgctgcatcctgtcgattgcaatgaaggaactggaatgtgtcgtatcatttggggttctacgcaaaagctttaagaaaacaaaggtctcacctttccgtataacaagctcatgtgcgtcacggcagatcacttatctatcggatccaaagctaaatatggcaaatcctctgcactattaaccgtcacttttgcatcagtcaggttatgttttcattgaaaagaaactgaaaaattaatgatttctcgttgtatagcaaaataaataggattttgcgaccagccaattttgtatattaacaggagttaccttgagatgcctttttaccattggctagccatcaattcatcccaaacgtagtagttccacctacatgttcaaggaaagattactcaacatcctcaagcatatacgaccaatgagtaccgaaactactgccaaatattatccaaaaattgttgagtctgcgcaagcggaccagagcttaaagctaaaccacacatgtttcagggtaaaggatccaaaggtcactgttgcgttctaccaggaacaatttggtatgaagctattagatcacaagaaattccctgacatgaagtttgatttatacttcttatcattccctaataagcagttttcgaacaactctcaaggtgccattgacgtctttagagaaaacggtattttggaattgacccacaattatggtactgaatctgatccagcatacaaggtgaacaacggtaatgaagaaccacaccgtgggtttggtcatatttgcttcagtgtctctaacctagaagctgaatgtgaaagattggaatccaatggcgtcaagttcaagaagagattgacagacggtagccaaaggaatattgctttcgcattagatcctaatgggtactggattgaattgattcaaaacaacgaatctggagaggggaacaactacaagttcaaccataccatggtaagagtcaaggatccaatcaaatcccttgaattctatcaaaacgtcctaggaatgaaaatccttgacgttagtgaccattcaaatgctaaattcacgctatacttcttaggctacgaaaatgatcaaaaaggaattgctcgtggttcaagagaaagtatcttggagttgacacataactgggggacagaaaatgatccagatttcgcttatcacaccggtaatactgaaccacaggggtacggccacatctgcatctcaaacaaggatccagctacgttgtgcgcagaaattgagaaactatacccagatatccaatggtctccaaagttcaatcaaggtaaaatgaagaatctcgccttcatcaaggaccctgatggatactccatcgaagtcgtcccatacggattgggcgtttgaagagcaccaaactctcatctatttatttgaaatgtaaatgcaaatttatgtatcgttgtatacaatattcgatatgacaccgttcaatcgccatattacagccataactgccggtaatactgataaagatatccttttgaagtgacatgaaagcacgtgactgagattaatataactcttcacatttttttttttttaatttttcattacgcagcaaacatgcagcatccactaacttcagagattcctgtaagataagtggttcgttattttccggattccaattttggtggtgctccgaaaagtggaagctcgtgatcctacatgctcacgaaacccatcatcatgcaatccacattaaaggaagggaaaaggatattgaacttttgactatttagtataaatgaaaactactttgtaagcttggacagaggaataatttctgattcgtgcttctgcttctactgacttgcaaaccagtaaacaagttactgcattaatcagtaataatctgcgtatagcgaaacttgtaaccagtttcctcgtaacaaggttagcagaagaatttgcaagaggatcaagttgataaagacgtatatttaggtctctgcacgttttcaaacttttaagcgagaatcaaacgattacaaaaaggaaaatattgatacaagtaataataaactgcaatgacacaatctttgccattgttgaacggtacggaagcgtacaaattagttacgactcaagggttgtatgataagacagtcaagttttacgaaaagtatttgcaattagttcatgacaagcgagttggcacattgacaaattctttaatcactctaaagctagttgttgataacagcttcaagccattggatgttgttaacgataaagattggagggccattgtgtcatcagcattggttttttcatgtacaaatatccaacatttcagagatttggctgctggtgaaacgattcaggcctatcctaacgaaaccaacccaattgaaatatatttgaaggatccaaacggatatatcattggtatcactgaaacgaaaaatgctatttctatcaaacctacgctgcctaagcaatctgttgaggcctctttgatctcctcaagatcttcaagaatagacattgcttcttctggtgtttccactgacagctcgtatccagcgattccaaagactgcgaaagcgcaaaagtccatcgccgttatgacatccggtggtgatgcgccaggtatgaacgcaaatgtgagagctattgttagaacagctattttcaagggttgtaatgccttcgtagtcatggaaggttacgaaggtcttgtaaaaggtggtccaaattatatcaagcaggtttactgggaaacagtacgtaactggtcttgcgaaggtggtaccaacattggtactgctcgttgtaaagaatttagagagagagagggaaggttacttggtgctcttcacttaatcgaagctggtgtcgacgctttgatcgtgtgtggtggtgacggttccctcactggtgctgatttattcagatctgaatggccttctttgattcgtgaactcttagatcaaggaagaattaacaaagttcaattcgataggtaccagcacttgaatatttgtggtactgttggatccatcgataatgatatgtctactacagatgctaccattggtgcctactcggcattggatcgtatctgtcaagcaattgattacattgaggccaccgctaactcccattccagagcctttgtggtggaagttatgggtagaaattgtggttggttagctttattggctggtatctctacatcagctgattacatcttgattccagagaaacctgcatcatcaagagaatggcaagatcaaatgtgtgatatcatttcaaagcataggtcaagaggtaagagaacaactatcgttattgttgctgaaggtgccatttcagcagacttaactcctatctcatctaaggacgttcataaagtcttagtggacagattgggtctagattgtagaattactacactaggacatgtccagagaggtggtacagccgttgcttatgaccgtattcttgcaacattgcaaggtgtggaagctgtcaatgcagttttggaatcaactccagataccccttctcctttgatcgctatcaatgagaacaagatcactcgtaagcctttggttgaatcagttcaactaaccaaatctgttgcggaagcaatccattccaaggatttcaaaaaggctatgcaattgagagattcggaatttgttgagcatttggataatttcatggcaatcaattctgctgaccatatcgaacctaagttaccagaacacacccatatgaagattgctattgtcaatgtcggtgccccagctggtggtatgaactctgcagtttattcgatggctacgtactgtatgtctcaaggtcacaaaccatatgcaatttacaatggttggactgggttaactagacacgaatccgtgagatctctaaactggaaggatcttttgggatggcaatcccgcggtggttctgaaatcggtaccaacagacatactcctgaagaagctgatatcggtttgattgcttactatttccaaaagtatggattcgatggtatcatcattgtcggtggttttgaagcgtttgtctccttgcatcaattggaaagagcaagagagaactatacagccttcagaatcccaatggttttgattccagccactttatccaacaatgttccgggtaccgagtactccctcggttcggataccgctctgaactctttgatgcaatactgtgatattatcaagcaatctgctgcatcaacccgtggtagagtttttgttgttgatgttcaaggtggtaactctgggtatctagccacacatgccgctgttgctgtgggtgcccaagtttcctatgtcccagaagaaggtataagtttggagcaactaacgcaagatattgaaaacttgacggaatcattcagcgaagctgaaggtagaggtaaattcggacaacttatcttgaagtccaccaatgcctctaaggtgcttactcctgaagtgttggctgaggtcattactcaagaagctgaaggtcacttcgatgccaaatgtgccatcccaggtcatgtccaacaaggtggtctaccttctccaattgatagaacaaggggtactagattcgccatcagagctgttggtttcattgagtctcaacacaaggtattagcagctgaggcaaatctggatgatgacgacttcgactttgatacaccaaagatcatagcaactgcatcagtcttaggtgttaagggatctgacattgtctttagttcaatcagacaattgtacgattttgaaactgaattgaacaagagaaccccaaagactattcactggcaatcgactagaaccattgcggaccatcttgtaggaagaaaaaagctatgaaattaaaaacgtatctgcttcctcaaaattcccactgaaatggatgtatattattatgtaaactgcatttataactctcaatgacaaacgattaacatttatgacatatctagttactactcacctcctggtatcaatttataatcccttttctctggaaagagtccttcctaccctagttactcatttttatactgatcgatgcggtgcttaaaaaaacaataaataaataaaaaaataacatgctattacatacgtagtcaacgtaaacaagtgaattcaccaaaagactatagtcgaaacaggatataataggtatattgagtgaagcaaccatctggagcactgtacatttgattgtattagaaagcattactcttagctttacctttttcaaagatggccattatgggatcaccaaagaagaaatcttccggccctttccaatcactgaagaattcgtttctgcgaaataagggacagccaccacaactgcaaccctggaatcctcaggtaagaactgataacactaaaaggaaatctgtacagaggacaactttgttccgtcatgactatgtgaaggtgcgaagttggccgtccgataatccaaaaaacatcaatgtaatactgagcaagactagcttcgaaatatatgaaatagatatgggaaactcgaaagaacggatgaattacttgagtttaggtaaaaaagatcagtttgtgcatccaattctgccgaaactaaaggttggaagggtaccgtcggatcaaaaacaagaatttaaaatcatcatttccctattcaatccggaaagattctgggaagtcacatttttatccattaaccacggtcgcgtacctcgtaaagttatcaacgaccttgagcaagtgctatccaaaatttgtcagtataacaacaaagatcctgacaatgcttcactaaaagacactaagaatgatacgaaggcgataccctcgccgaagattgacatcctcgaagaagtggatgatttggagtatctattggctgagaatgttcctgaccaggagcagataccagaagcagaaagtctggaactaaatgaatcatcaaccatatcttccatcagtatggaacactcactagtacagtctggagatgtcgtaaataagacattcaaacaagcattaggaagaataaaacccattgactttaacacaagagcagaaagcagtaggtacaaaaggttcagctcttttcactctgcatttttagatgttcctcgcataagcgcagaatatcaacattctttacaagataaaagacggtcgatcagtgttccgactgcaattgattacaagtctgtttccaatcacgacatgagaaagggtgttgattttgacaaggtaagttggatggatgtcacattcgaagattttccggagatatgaccgacaatattgcaggcattgtagcagtattccaggtttttcctacatgtcaatttataactcaatgcacaaactgaattatgtatgtggcgggttctacgtacattggaccataaactcaacaattttttgtttaataatcaagatatcgtattgaatatgttatcggtatatatacatgtatgtatatttcttaagattagtgttgagtcttatcatcttaagttgaaaatatcaccatttgtattttgttatatatacttggctatgaacaagagtttgtagtttatgattaagcatataaaagtagtttaacagatatgaatgggttgggtcattaaaaacatcgcaagaaacgttttaatcgattttcgataccaattatctcttctcgtgagaggttaagtttgcgtagtttgaaggtattctgtgataagttctgtcagttggtcagaaattgaaacatacagacgaaagatattggctaatgcagagaaagtcattataacaatttcttagaggttactatttgttagtttagtttaagctggtggagcttgtagagggttaccattaatatctagaccttgttgcatcattaatagttcttcgctaccggcagtttcaaattgtaaaccggcaccaagcttgctttcattcttgaaatggtcgatttcaccacagaatagaacggataatgttggtaagatttttctttccaagaaacagccgaccttaccgtttgaatcaatggaaccacggaacacagattgtctgtattcgtacttacaacctaaagtggtagcaccttcaatggctggttggaacccaataggttggccgataactgggtccatgattggcaacatggaggcttgtagagaagtttctagaccagcttccatgtttggagacacctttctccagaaagaggcgacagcagcaccattagcttgcaattgaccggagaagatccagtcctgcttagcagaaacgaaacgtgtcatataggacacagcggcgtcagctggggacatagcttgacccttagaataaatagcttccaaaccaatagccaattggggagtaatggactgtagaatagaaccaacagcaacaccagtgaagctaccgtcacttgcagcagaaggattcaaagtcttgaaattcaaagagaaatcagaagcctggtaatcttgttccaattggcacattgttggctgaccttcagagatttgtaacgtgaccttggtgacattgttcttatcccaaccgtattgcagtctaccggacaaagacatttggttatcaacattaccttgcatgaacaagttatcgttagcaaacaaagcactgaaggcatagtttggcaaagattcagagcccatggagaaagtatgagaggtttggaaagctgggttgaaggcaaaagtcttgttcaaatcggctctcaaaccggtgaagaaatattgtgtcaagaaaacatcacgagaaacttctttgttcaagttttcaacggtaccaggattcaccaacgaaagagtttttctatgagcatggatgttgttataagtatcgatcaaatatgatgagattgggttggaagaccagaaagattcacctctttgttctggggtaattggtgaaatacctggcagagtagagatctttgaaaaatcacctagaggtactggagaattagacatattagcgtgattggtaacggcaaaaagtattacactaatcggaatatattattctttagaattgtcgaaaccttgtggcaagtaaaacgttctctgtcaattattgctaaaaggtgttaaaatccaaacaaaaaaaaaggcaacctgtgtagataactcgccagtattctaaagtaatatggttgaatagtagtactatgaacctatttattaatttcaatccgttcgcaaacacaaatggaaccggaattgtctaataacaattgtactatcgtctatggttgtaacttacctcatttatattctttcgattgattattttattccaaactcgaaaattttcttgatcataggttacggaggtcacgtgaaaataatctaactcttcaacaaagacctcattcgctgtacgtcaagtaggatattgatattaatagtgttacatagcatttgcttgtgaggatgatgtgtacatataatggtcgaaatcattgtttctgaatactttctcgcagtcgttgtaggtgttttgtctttttttcaagttcaatcttcttttcctgtatatgcagttgccattgttcgggagtctttgagactagctcaatggctgcagggtcttgctgaagtagagtctttgctgttttcaaacgatgccttatactcgaagtagccgcatccagcgaatttgaactgttatttggatgcttactaatttgtttcaaagaatggtaaaggagtggtataaattcagtttgtgttgatgaatgtttcgtgagaatttcatgaattcgtttcaagacatttagttgttgttccccggaactaggttcttgctccttctcggtatcaccggtcatattaaatcgttgattgggatgggttggaagccttctttttttttactattcctcgttcccattcgactattattgagaagtcttcgaagatttcgttaagccttaattttttggatatatagccaacagataattttatgtagattgacaatgataatataaagtgaaccgagtacttatatcaatgaatatgtgtgttttactacatgctcttgcaggaaatatctactttaaatataattgtacgtacaggcagcaagttcagcactttccttctttaattcaaaacttgtgattttggatcaaattcttgatcatatctcttgcagtcaaatacaccgttctgtataaggtgtagatgtctaaggtacttgagaaagtgtcgaggaatccaaatggtagcatggctggaatccatccctgggccaattccaaagcaaaggatccgcttggcatggaatattgcttggcataaccttttttcaagtgatgagtttgacctggtttgtaaatttcaggttccatgttatatggcaaactggccctctgttcaccgtaaagaatggtgaaatggtcatcagcaaagtgtacaccggtgtgaccttcagtaccaacggcactaccgaaaataatcaaatactcgctgatactagcatgcaagataatcatttgacccatggcaccaccagcattgttgaacacccattcttcatcaacccattggttgatatagtcatcaccgtaatgtttggccaatgcatctcttaaatcttttagcatcaccttaacatcgaatgtttcggattcagcgtcatatttgctgataacagaattggatatctcgttcaatgtctttgcatcaaaaatgtagttggttggcaaccaggtatatagtaaactgttcaacagatagtacgctgtacctagtaatagtgcaattttcaaaagcttcatggcgaattactagtttcggaacacaagacaatttactccaaaaagataatttctctccgttatatttcactttctcaacctttggattagtagctcatcgccaaattcactttcgcttatcataccttatatatatatatatatatatggatgttttccataatttttgtcgtttatgctcatcggaaatccattcgagactgaatttttcacacagtactcgtttatattgaaaactcagaagaagctgaagaaaggtacgaaattcaagaaacttaccgaaagcttagtcttggagtaacaagctatatgatttacattattaaagcttgttttactaatacatatgaccattattaatgtgactatatatatgtgtatctatatagcctgtatttacgagatggggacagagagatgtagaaaagagtgaattgtgagtattatatgatacaggtggatctcattgctggttcaagcacctgtgctgaacatttgtagtagtgacttagctgctttcactgataccggtgtgtatccggatgagatcgcggatgttgatgcgtatggttttgccgggtaccttttctccggtgtgatacattggatgtgttgttgcgagcacactgccaagtttgaagtcccattgttattattattagttcttgaagtagcttctatggccggattcaatccagccaactttctggatttcctgtcattttcgggtttccttatcttgttagctgactgtttcttgcgacttactatttctgagaacttcaggtgcacttgtttggttctgtacttatagtacgctagctgaacccttgatctaagtctaagtatattttcatcagtcagttttgagttcttttctgttaattcgttgtttatcctttctttaacgtcatgtagagcttgaggtggtgtgctgtagaactggctggatgaagtttgagtgtttaggactgatgctaatgaaatttctgaattgttgaacgattctgtcgatggactattagaaggagtgtttagctgtggtctcacagaacgtttcccctgatgaagtttgttctcttgactcaatacgttcagttttgagctagatatttgccccagtggtaatctaactgacattgtaattgaaaaacagcgaaaactaacagtaactttgtaaatgcctaaccgactactgttctatgatgtgttgtgaagctcctggttcttgtaatgaatagcaaatctttgagagagtaaaggtcttccttgtcaattatatatcacaatcctaacaaagtatttacaattgtcttctaaactgtgagtttaataaccaacggaaatcggaaaatcagttaacagctgtagtatatgtaaacaactgtattaggatctgcttatttagtttgttgaaatgtcaatcactgacttattcactctggaatatcactgtgcacagagctaaaaaagaaatgtgttcagcgtattacctttcaggccaataacgaaaacactaacaaagacggttctttgtttacaatttgcccaaaaaagtacaacatttcacgcgtcgcgttctcgaaaaaattccgaaaaatgatgggaaatggtgtacgctagactgcgattttcagcgggctcaaaacggaacgagggtgtccctgccttgcagctcagttaggccttgctgatgttatcttcgactggcaagggtactttttcttaagaactttgtaaatccactctgtgtaagaattggacttcgctgtttgaaaagaaaaattcagaaatacacagaatataggactataattgttactagctttctatagttttgatgttcctttacaaggggaactgaatttggtttatccattcaggaagatcagataagatcctttcttcgatggtatcaccttttccgccggcaattttcagaatatattcgtttagttcagcactgcctaagatatctacgtgttcggcactcttggcgcccccacggatatcgaatctatcaggttgatgtctcatttccacaattttgacttcaataccagcagggttgtaagcagaaacgccttgcttccatttgtggcacattgcatgtgtcataagtgggactgttccgtcaccatctgcaaagaacactggttgtggtgagtcgtaagcgatagtcatgttcaagtaactggattcagaatccttcttgtatgtataagcacgttctgttgggttgttaattccgtaaagacagtatattttcatgtttggggcatttggtaagggaacatccaatggattactccaatatgaatggtataattcattgttcttcatttcttgctcacttttcgcgtacccgaaagaatactgatcagtgatacgtttttgtaaccagcttggtgaggtgtctctaacgtattgaacggcgctgctcatggtgaaatttgtccatgttgaattctctttagcaaggaagttcccatcgacatcagcaaatctaataaagttaccatatgtatcagtgttattgttagcagttgcattatcctctaccgagaaatcgagatcaccccaaatcaattcaccacctttaggtaacatcgatggaattcctccccaagtttgtatcatttctaatctttcacgcctggagaagaatttctccaaaccgtacatagctagggtgtttaattgaatagtatccttcatctcgccactaatcaacgctggtacacattttggtgcaccaagcagtgttcctgcaatatcaacgaacgcggcgatgtgtttatccacccatccctcaccgccgttaccgtacccttcaccagatgcttctatccattttagaaaatagaacactacttgtgatcccatcgaatggccaaccaacacagatttctctccagtttgttccaattgcaactcgatttgcatctttagtttggtgaaataacgatcacggacttctagatcaagatatgatagtctccaatcatacgcggctgttaccatcttattgctctcataaccaattgcgcctaagttttgaagcactttattccataaccaataacctgccatgaaaaaatcggccgcctcaaacccttgagctgcacgtaatttgtaatttggtggatcaagaccggtctcgggatccaacttgatgtgttttaaccaacagcttttctccaagaccattgttttcaacatataaaatgaaccccaaagccttttccggaaataaggctcactatcacattcctcatccttatacagcccccaggattcaatgccagttgagatgacaccgggaactattaccaacggatgcttatccgtcaagttgagatcttttctcaactgttttccaacggcaaacgattcagtcaagtccgcttgtgtgttgtcaaattggaaatcgtcaatcaaactggaaacgctttgcggtaacaggcctttccaatcaccaacgtaattttggacggactccaacacgtaaaagttttcaaatatatcattcctatacttgtcggtagacgagccaaaccaaagtgctagcagtaaacccagcattgcaccaaagatgaagattagccgtcttgaatccttccaagatctttctgtttcggagtcatcggcaccatgcttaacggaattgcgtcttttcaattctcctctcactcctgagctaacgtcagtaatcgatgatctcctggatctgctacccctactttcacttgatccgtcgtttcttgtgggtgagttctcctttcttaacgagtgcgaacgccttttagtcctaagcattgtcctttcattcacaagtttctcttgataaacaatattatagctcctgatcgtttcaacttcaaaaattcgaagattctaaacagttcacaatcgctgtcctaactttgcagatataccgtggctgtatggctgtatgaaagaaatatgttttccctcaaaccattgaaatgagttgcattgttttgccatatctattaaagttcgaaatgttccaagagatgaggtgatgcaggtatattggacaaacaggcaaacttgatataaaaaaaaaaacccacaaccgtggtatcgatgtgttgtcgatcgttgttctaggaggtgataccatcactcctcaaggcatagcatgcgcgcgtccaggaaatacaataatatcacgtgattatgtattcattctatttaactgtcgcatgactatcctcaatccagccttgtcttttccatgacaaatgcgatcatactaggcctagagtccgcctattcctcctctcatgaattctctgaaaaatctagtttcaacattcccatctgagtaatacctacatgtaatgtaagattaaactcgtgctctataatttctgttctatggctcgtatttcaattcttaaaatatcttgttacatgtaaaattgtaaaatcttaaccttttaaaagaatcccttaaactgaagaatcgaaagataaactgtaacacacagttaattcagctgctgatatcaccaaagaataactcacacatcgccgtattataatgttaagatcaacactttcaaattggagagaatatctaacgccaatatcgcatacttcgacttttgagacctctggccagttgacaccggaagaatttgtgaaggcaggagactatttggttcatatgtttccaacgtggaaatggaacggcaacgattttcagaacgtccatcataaagatttcttaccgaacgataagcaatttcttgttaccaagaaggtgccttgtaagttacgagccaataactatcttgaattggatgacacagaaacgaaagatgtcggagacggatgggctttacaggaagaacacagccaagatagtgaaaggaagagtacaaacaacgcggacgattctgagttaccggaagagctagaagagttgcatattgtcgacgatggggatgatgaggagtacgatgaccagttgtacgataacgagtttgcagatgatgacatcgtcgatattagaccttccaccttaagattctacgacttatatataacgtactcgacctcgtatcgtgtaccaaagatgtacttatgtgggtatgataatgatggaacgccgctatccccggatcagatgtttgaagatatagcagcagattatcgatccaagacagcaactatcgagccactcccctttttgaaggggaataatatttccgtatcaatacatccatgtaagcacgcaaacgtcatgaaggtacttatggagaaagtacggagttcaagaagccgtgcgaggaaagtcgatccccagacaaccgatgaggactgggaagatttacaatccgatgttgatgatggcttgcgggtcgatcaatacctagtcgtattcctaaagttcataaccagtgtaacaccaggcatagaacatgactacaccatggaaggctggtagaatgcatcagtatcgtttgcaaaactgttttaaataccaaattaatttataattcgtaatactgattgtagttttgtgatcatgtgatcaacttattttttgtcattatcaatcaataccactttaacgtttgaaagcaaatataggaagatgagatgagatgagatgagatgagatgaggtgggatgaggttagaagacatggctcggaatactgccgtgtctggtgcgttgaagattgttcatatctgaaataaatatatgatgaatttgtctgagcaacaaaagcaacagatcgtatgttattggattaatatgacaaaactggtatgtggaacttgaagttactaacatgaatatttaaaaccaggaattaaatcgacaaaaagctttggctcggctcaagcagagaggcataataaagacacctcaacagctaccagtgagtagtacgaagcaaaatgcactccctgcagaaaatgggaacaacaaaagatcctttgaaccaactccggaacagaagcaggctattcaggtaaatagggaaaaggcccaggaaagactaaagcaacgtcagcagaaccttagggacgcatctagtaatgaaaattcaactatcgaacagcagaaaaagccattagaaaagatacgacctagtgtccgcaggcaagattatattgagtacgatttttcaacaatgaagaactcctacggagggtttattaattcagaggagatgttagatggcggagattctaaaagagcgaagactttggaggattggcaagaggagcaaaaaaatcgtaggatgctttttgaggaagaaatgcccgcttttaacatgtcatcagctccgagatgtgacgaatgcggtatcaatatcgaaatggatccattaatgaagaaggtctttcatcttcagatttgcaaaacatgtgtgaaaaaccatcctgagaaatattccttattaacgaaaacagaatgcaaggaggattatttcgtaacggatcctgaactttctgatgtgtcattgttggatagattagacaaacctaatccccactcggggacattttctaggatgcaattatttgtaagatgtcaagtcgaacagtatgcattcaagaaatggggaggcgaagaagggttggacaaagagtggcagcgccgtgaagagggaaggagcgttaggaaagaaaaaaaatatcaacagaagttgaaagaaatgagacttaaaactagagcacaagagtatacaactcgactcaaggaattcaaacatgggaagaaacatgtgcatgatttcagtgacgcaagagacggaggagtcaacatggatggtgtaaaggttcaaatacggagatgtctagattgtggactcgaaattgaagagatcggattataaacgtacataaaaattcacaacttttgcctacataggtttatatacgtagtcgtgtcatacaaaatgttaggtgtaataattgtttcgaagaagaatctctaatatttcattacagctcaattagtaattgctcttgctgaacgggttcttctttaacttcttgctcagaaccatgtatagaaagttttctcagaggcaccgttgggaaatcgaacgacgtaatattctcttgttttagatgatcatccggataaggtctctcggacgcttgttctatttttggattttctatagtagtattttcatctggataaggtggctcgcttggttcctctagaatgagaccctcgagttgcgatgttgtcgatggtttttcgaatgaaaccggttgtggttcaggagcagctggttgctgattttgtaatgcacttccttgctgatatgtgttagtggtagcgccattggataaatgctgtgatactggagatgcatagttgagtattgttctctcattttgttgcggcgaatgaatttggggttgagctattatttgcgggctattgggctggtcatattgaggcatattctgatggtatccgtacgaattcctacctgattctggaatggcatattgttgtgaaaggctgatgttccttaattgcatttctagcatagagtcgtacatattcatgatatcggatatcttactgttcatttcatagacagtattgtatttggaaacggtatcactgagcgcatagtttagctttggtcttacacctagtaccttttgataaagttgctggagctgtgtatcttctaggacggcggttggtggctgcgttttcatcctctccactaaggaagcgaaaaggtgaatatcttcttcttcattactggataaatcgtagttgttttcaataggaggtgctactgacggcgaagaagtattatacatattcttcgcctgtgatttccttctcatctcctcttgctgatgttctctcaagctcgcctcgattgcagccttcaaatcaggatcctcttcatcaggatctttttttagtggttctaatttagcagtatccggaatgaaagtatctgcatctctaccattctccttcaaagaaagttcgatagctcttctgagatcctcatcgtcatcctcagaacgtgtaaatctcttcttgcctttcgatttcttccctttgcttgatttacgtttcaaatcgtagtcttcaaaacagttatcacaaacacgcactggctcgaaaatacccaagtcaggcaatggaatgaactttgatgaatgaagttggcagaagacaccaccacatgatctacaatgatgtttcctgttgagtaaagtaaattgtgtggagcaaatcatgcatgcatcggaatcaatccaatccgcaggagttttcgcatcaaacatagcatttaaattttctgtcggtttcaaattctccatgtcaatacctctggatactaatttctggtataccttaactacatagcttaattgcgagtcatttttgaaagccagatataattcccccactaatctactacaaaactgttctaattcgtagtctgtagattcagccaatattacttgctcgaggcagtccataaactctcgtgagcaaacctctttcaaaaagggaactccaccattcttcatgcaaacttctactagtcgccagacggagaactgcaaattttggttattcctggtctgtagcaccctctttttcaaacatctcatagcgtccttcggaggaagtcttctcgatcttatcatgtctgataactccaaagctgccgataggtctatctcaccgttaggtatcttttcattggtgcactgctctatcaaagcgtcaaattcggaaacactcatacttggaagggccatgatgtcttaaagtctaacgcaaatacagttgatagaagcgtagttccaactatgaaattaagctgcaaaaatgcttgttaatcactcggcaaatagtgaaagtagtttgttaaacagatggttctctagagtttgacatccttcattaactttcagcctccgatcttgcaaaagggatcctgatcgatcatattgaatttagataattaaatattcaatatcacgtgacgtctacacatatatatatatatataatgaagatgtcagtttagataggtattgatgtatacatgcacgaccgcgtagctttatgacacaaacgttactggaattgtacaaattacgtaggcatagttgaaaaaaagaggatctcatctacgcaaaggcgtcaaaatattgaagaccttgagtccttaatttcttatatccggaatatactacgacagaaggaatgcgatagaacccacaccgatcagcgccaacgacccccaccaatatttctctatgtttggcgcagtcttcttgacagcattagtcttgtgtctgttttcgatgctccttctcacgtgcgatatcaaatctctctttgcattgcttgtaggctgagcatcatcactggccgttggatttaatgttatggtgggaagcatcacaggtggcttatatgccaaaaataatggctgcaaaggggcaccatcgcttccatataattgtagagattgtttcccataatacgtgtctaattgcaccaagtaacttttgaatgattcggcctgataataacgtgagtaagtggatactccttcatcgtcacaaggttggctgagaagttgtcttccatcaacttcaatcggtgttagaactaattgtccgtcatccttaacttcataagtaccatgctgaaaaatcaagaccgctacaggacactttgggtcttgtggatttccagaaacttggtacattgcttcttcaaaatatccatcagcagtaaaagaatatgaaataccaggtaaagctggttcgatcaataattcctcgattggatcataaaatccaggccccgtgaacacttggtttgatttagaagaccatgttccttcaagatctgagttttggccacttacagcaacagcaaataacgaaagtggtattaatacacgcattcttttgtgaattttctcgaagtcctttgtattctgtcaataaaacacctgaatatatcacagcccttaatataactaagtacagctgattaaaactagactgtgagaatagtagtacctcgtgaggtgattgttcgccagtgatgtttgaccatttataatatctcgttgtttagagctactgatttctaaatatatagaatttctggtttcaatttcaatttttgtttccgtcaagatgttatgaaatggctgtgcggcagatatcagatcaaaggaaaactgcatagaagatgattgatgagaaaagtagagcaataggagagagatgacatctaaacctaacaaatgcctcggttccaatgttctctaaaaaactgaattacaattatatagggtaaaaatgtagtagaaaatctatgaattgaatgtaatgaattgaatgtaatgagtagatcaatctaattacattaaagaaagttaataatataactatatgattaatagtatagttcgggatgatatcaaccaaatgcctaagactttttgttctgtgatatttgattcacacgacggcatttcctagaggtaaagaaattagagaggatctattgctatttccgttcgaaatggatcctccaccgctggaaaagacggaagaactttgtccaacaaattttgctcgaggcgggacgatatatgagttgaccttatgacaatttgccattgatgccggatcgatgttttccttatcatcatatgatcgcttcatgcttgacgttgagtgtaaacttatgtgagagccattggccgagttcggcgtgagcttattatgggtaaacgaatgcagttgcggtgttaaaggtgaagaatgtgtgacgccataagtgctaaataggctattgtccgattgtgtagagattttcctcgaagaaggagaaaatgtctgttgtgaataaggtggggatgggaagttttgctgagcggaaggaacttggtaaattctggttggagttgaatattgtatttgtctctgctgtgacaagtattccatttgtctttggtagtccctaacctcaccgacaaattgtactataccgtcgaattctttataactttcccacaattgttctggacagtctaagatagcatcgatgtaaatatccacaatcgcatcactagtagatccagtaggaatcggtgtctgtagcaaaggccccaattcctggttagtgaacttgttgatgagttgaaacatcccatgcgtgacctcaaattgttcgaattttaacagttgatattgccagctggttaaatctatcaaaaattttttaatattgatcaattgaatcttctgtgttaaatcctcatcatcctcattttcttcttcattttgaagatcttcatcatcagtagagtccgattctttattaattgatgacgattcttctttatttctgtttaaccatttacgattatgttccaactgtctcctataaagttcgtattggatcgcacaattttcatcagcgtttaatatgtaatcatttatcattggctcataaatttcccatcccaaagtgttcaaaatatgtctttccatttgagtgaacatcgattcatcaaatgtctgagaatcattgcaaagatggatcaattctgataatcttgggattcttgccctgggattaggtccatagaatctgccacctgtaggaacactcacattgttaataatgtgattacatccaccccaagttttagcagctagccatagacaagttgcaaccaccaatttgacttgttctcttagcacaatacgttttgaacagtaacgatcgtaaagtctgacagcttgataaaagatcccattggttactctggttttcaatgcgagttcaaaaaagaaattgacaacaacgtgtctcgtcttagaaggacctagctctggttgttgatctatcaacttcgaatcaggttttagtctacaagattgagtgatacagttcagcgatatttcctgatgataatcctgaacagtttcgtaatgagcaagcaattcagcatttgacaattcaatcggataatatgtctgcttcgcagtgaccacaaggcccaatgaagattccctgctgccagagaattgattcatcgttatctgtttgatttacctttacctgagagcgcaaatataaatcaaccttctaaggaaaaaatgagcgaagtgcctgtacagattacctgaagtactagcgagagagaaaggatgaatgcgctgactggtacaagttgagctaaggaagagtagatgccaccgattgctgctgctagttcaggtagatagtagaagggtagaaagaaaattaacggacagtccaaacttcacaagaaatcactggttcattatatagaaaagaggtcactgttgtaagacaacacgagatagaacatcgcacataccttaaaccaaatcaggcaggcagctagacattttagggcgtactctcgaaaatttcagatcaaagaacatgaaaacgctctacacaaaaaataccagaacccaactggggagagatcctcgaatgctccaccaaattagtgaaccatcaacagctaatagtcagaagccctcgtattgacatactgccaaaaacacacagaaagaaaatacaatagtacctaatatttcgcagaatgcataccaccgccaactgttttgaccctcaaagcaaactatcctatttttttccaggccctcactgtactgactcccgcattcaatgctccaagataccttggtgcgattctaacaggcgtttccagaagcaccgtaggaagagaaacaggaataactcgtagttctaccaaagtcctgaaatctttcgctcaatctggaaaaaagcatcaagaaaaatcaaaacggtatatccaaactcatcgcgtcttcacaaaagtctagcgaaatgtgccaaattcatcaccaaaaagattcattctcaactagcatatcttctgttgacattgggaaaccacgaaatttttttttttttttggtgaaagtaagatttcgcagttttgaaggtaccttttagagcttggctgaaactggaaggaaaaaaatgtagtacgcttcaggcagagtatcaacatccatacggggaatttgtgctggctgattttcgcggagcctgggcaatatgcaggatgtactgtcttaattgcagagcgcaaaaagtaacagaaacttcttctcgaatgagacgttacaatggtgagagtggtgtactagttctttttttggcgtaatgctgccaaagtcaagtaatcaagatttccgagtcatgtgacatttaataaggttcatacaacggataggttcccattactatcttgggttgccagaacaatttcttgctttacattcttcgcttcttgttaaaactaaatttctgtcaaagggtacggtcagtttcgtggaagaacgggactgagaccaattcgtgagctgttttgatatataaacattctgtttctggatccacccacttgtcttggatgttagttgcacccttactgtaaatgacggtgcggaccttgaaagggcatttcgcattattgaacatcaggtaaattaaagacttatcttcggctatgttcgtcatgacaatgccatatactgggtaaaaaacctcttccgtttcagcagacatataagagcgaacaatatggtatttatgataccctatgggtaaaacaactgtggtcaataggtcaacctggcctgattggttgaactcataggtattacagaatcggcatacagttttcaattggttgtcgtaattaaccgctatgagttggaaacctcgatcctttaatacatgtactttactattttcagaatcaatcgtgatgtagcccaaatcttcacgtttgtctatgttgtaaatgttcagagatgcccttactttgtcgtaaaccaggagtgtggacagtgaccaaatggcataaaatgaatctatttggtacccaacatctaccactaaatcttgctccaagttgagattctgcttttcgatagtatatatcttgatatcctgtccgtgattaacaagtataatcagtcttgtctcgtaattctcccataataacgacttcatcgagttgacttcatactgcaacttcaactcatcgttttcataaatgtataatcgcgaagcagtagcagcgacatcgtatcttttctcaccagcagcttctaatgacatcaaactggggatctgggtaatttttgcgatgaaaatcccgatcagtccactattccctgaccatcctttatccttacctgtttcgctattgtttgtatatgtgcttttagtttttcttttgacatatctaacatcaacaaaaacatctaagaaaacctttagaacaggatgatactccaagtagaaaaatattcgggtacgttttgaatgtcacaaaagcagaatacttgattgttcgatcatagccactagttgaccaactgtaacataactggaccttatacggtcgatagcaggttattaatccattcatcttttgcggaaatatagttctacattgacaaggccaaaacaaaagtatagttatgggttctgatgatacgggaggtctattcaaatggacaattgatgcgctattcaacagagacacatctccatctacaatgtatgataaacaactgcagcaagactcattcgatgaggaaatatactcaagacctagagcctcatctttctcggatccagatatttactcaaaatatgaattattacgagatgaggacgaacctgacttattgagacctgttagcatgaacgggttaccttacgagaagcaggatacaaacactttccacgcaagaagagcaagagagaggcgagttcaagaaacgccaaatattagacgagcaccgaatcccaacgatcccataatctcaaaattatttcaagtcgatgaagatgattcacagttaaacactaatgagatgaggtcgcaacgagaaaaattcaacactggacggttaccgggcaagtttccatctccaactaagcagtataatgctcgtatatccaacagggatgcatttactggagctgaaagaaaagcggcatcaacagctccagcaataccaccagtagctccatcagtgcaaaacttggattacacacctgaatatgtgaaactcatggataaattgagcttaaacaacaaggagctacgtgatttaaaggtagatgtcagggaaagacagaagcacggaatggaaaaggaaacagaattgaaaaagaagtacctacagatacgacaagaacttatacaggagctaaaacagtccaagatgatttatgataactattgcaagctatactataagtacaaaggggtgaaacgttccatccaactgccgacccaaacactagcctccaattcttcaatgctagataaaattgcgtccttggaaaaacaaatcgttgatttatcaatagaaaaagacaggttaaagaagaaatcagaagaacgtatcctatccgtagaactacaaaagaaggagttggaaaacaaatttgaagtggaaagaatgatatatgaaagacggataaaggatttggaagaaaaattgtatgttcacgaacacccaatacgacctgcaacagacactagtccagtgtcatcttcatcattcatgccgcatactcaagaaacttctgacagcactgcttcgccatataaagaatacaacaatacgatagacacacaatttctaagaaatctagtcaaataacaagagaagaagctcaaaattgtaacaataaaaaaagtaatagtaacggtaacgttctaattaatgttttgtccagaaaaatccccagataaaaccttatgtattattatactagtaagtttaacttggatctaagatattccgaaaccaaagaaactcgagaaaaaaagaagtgtaggccaaaaactacataatggctaggctatccttcgttgcaccagagtttccagtgctacctactgttttttcatattgtactgtatacagtcttatttaactttctacacacgagttagataatcctcaacagaagtgcatgagagatggaaagctttctcgcaaataaggacactctcataatagctaccataacgaggtactgttcgtgtatcacatcacggaaactttcctattattaccccacagctgaacgcgacagatctcttgtagtaattacctccggaccctcgtggataattccagcacactaaacgcagagaaagatgcctatatagcctagtaatcagtagctaccaagaacatgtccataaccaaaatccaaattgttagtcatagactcgacatcaactgttacatttcggccatttgtctgtcccactgagtttctaagtgaaaaacatcagtttctttttcagatttttccgggcttgaaaaattcgaaaaaatttctactttgtgtattgtgtatataagagaatcagcacatcgatgggatgagccgatggtgtgatggaacttagtgttgtgctgtggagtaggtatagatagtttcatattgtataattgtagtctttaaactggttctcatcagaaatatcaacttccatagacgataaaaacattttatctttggtattatcttaattgcaccaccagagtcattcacaaactaaaagaaatgtcacaaactccaacacctatgttccatgaacaagaagatgtcagaatcttgggttacgatccattggtttcaccagctctccttcaggcccaagttcctgcctctcaagagtgtctagaaactgcgcaaaagggtagaaaagagtcaattgacatcatcactggtaaagacgacagagttctggttgttgttggtccatgttccatccatgacttgaaagaagcgcaagactacgctaagggattaaaggctttgtctgacgaactaaaaggtgatttatgtattataatgagagcttacttggaaaagccaagaactactgttggttggaaaggtttgatcaacgatccagatgtggataacacttacaacattaacaagggtttgcaagtctctagacaattgtttgtgaatttgactagtttaggtttgccaattggttccgaaatgttggacaccatttctccacaatacttggccgatttgttgtccttcggtgccattggtgccagaaccactgaatcacaattgcatagagaactagcatccggtttgtctttcccagtaggtttcaagaacggtaccgatggtaccttgggtgttgcattggacgctgttcaagctgcctctcactctcaccatttcatgggtgtcaccaagcacggtgtcgctgctattaccaccaccaagggtaacgaacactgtttcgtcattctaagaggtggtaagcaaggtaccaactacgacagtgtttctgtcgcagaagccaagaaagctctacctccaaccggtgttctaatgattgattactctcacggtaattctaataaagacttcagaaaccaaccaaaggttaacgacgccgtttgcgaacaaatcgctaacggtgaagacaaaatcatcggtgtcatgattgaatcccacatcaacgaaggtaagcaatctattccagcggaaggtaaagctggtttgaaatacggtgtttctatcacagatggatgtataagtttggaaacaactgctgaagtactaagaaaattggctgcagcagttagagcaagaagagaactaaaaaagaagaacactgaataaacttcatatcaataatcataaaagaaaacatatgaatacctgagtacccatttgaaacacgtttttatttaaataatcttttcgttcaattgctgaatttaacgatttgtatataatagtctaattacaacacggaaagacatgaatagataaaaaaaatcatgggctcgttttaataaaactctagcaagaacattataagttaacagcagaatgggttggtggattgtcaatgactgatttcaacaactcattttaacttgaaccctgtcaatgactcactctctgattctcttctgaagtttcgaaaaggtttaatttttttttaaaataatagaaaatacagaactaacgaatctaatcttatgaaatacaagtgtatcgatgaggatatatcgtcagcaagagatttcaaaggataaacagcaaacgactggtagcgactacagtaaatcacaatgacagtcgtgcatattattgatgtggaatctggtaatttgcaatccttgcagaatgctatcaatcatttaggttacgagacaagattaatcaagtctgcttcagatccagagttacaaactgctgaaagaatcatcctgccaggtgtcggtaattttggccattttgtcgataacttaacttctcgtgggtttgagcaacctatcaaagattatattgcatccggaaggccgttgatgggtatttgtgttggcttgcaagcgcttttcgatggatcttctgaatctccttcaagcagagggttaggtttaatcccaggtactttgtccaaatttgatatcagtgaaggtaaaagtgttcccgaaattggatggaataccattattccacaggacgatctttcatttggtttagatccttataaaaggtactacttcgttcattcttttgctatgatcgtcgatgatgtacaacttgatgacttgcatagtaagggatggaaagttgctttgacaagatacggtaacgaaagatttgttgccgccattcacaaggataatgtgttttctacacaattccatccggagaaatctggtaaggccggtctagaaattatagataactttttgaaaggtattcacccagttacagagtacacagatgaacaaaaatctcttttagggaatgactatacaaactttggtttgacaagaagaataattgcttgtctcgatgtccgtacgaatgatcaaggtgatctagtggtaaccaaaggggaccaatacgatgtccgtgaaaaaacagaaggaggcaacgttagaaacttgggaaaacctgtagagctcgcacaacgttactatgaacaaggtgctgatgaagttactttcttaaatatcaccagtttcagaaactgtccattaaaggatactccaatgttggatgtgctaagacttgctgccaagactgtgtttgtaccactgacagtcggaggtggtatcaaagatgtcgtggatgttgacggcacaaaagtaccggctttagatgtggccggcatgtatttcagatctggtgctgataaggtttctattggtacagatgcagtgtttgctgcagaaaagtactatgctaacggagaaaagggtgatggaaaatctccaattgaaacgatttctaaagcttatggtgcacaagcggtggttatttctgtggaccctaaaagagtttatgttaacaataggaacgaaacccctaataaatgtttccaaactttatcgcctaatcctgaggggcaaaattggtgctggtatcaatgtacaatcaagggtggtagagaatccagagacctaggagcctgggaattggctcatgcatgtgaagcccttggtgctggtgagattctcctaaactgtattgataaagacggctcaaactcaggatacgatttggaattaatcgatcatattaaaagtgccgtttcaattcctgttattgcctcatcaggtgcagggaatccaggtcactttgaacaaggatttacaaagacaaaggctgatgcttgtttaggtgcaggtatgttccatagaggagaatacactgttaaccaggtcaaggattacctgatctctaaaggtttaaaagtcagaattgataacgagtaaccttatcgattaatatcgactcatttaggttgttacctagtgcgtaatctttttaattaattttgtaaatatatagatacacaaatactgtctaatgaaagtacagataacttttattaattttaatcatccatttcatcagctcttttttctgcttcttcgtcagataatttaacaccaccagaaatagaaaactgaccaccgcagccaatgaagacaatgctgtgatcttgagtggccgtgtttttgattcttgtaggtgtttcaatatcatctccagaaggacctaaaccaactgcataagtttcaccgaatccccaggaatacactataccatttttggcaatagcgagggagtgatgagagcctgcagcgatggccttaaatgaaggaacgtcttctaattttgttggaagaggaatagaacgggccttgccatgaacatctttataagtgtactcaggtagtttatcctttgaaataccgacttcaaacatatctaatctaccacaagaatataaatcaccagatttcgccaatattagagtgtgatgttctccagcagaaacagaatcgatttcaactccttctggcaaaatgacctcagtaggaacacttaccaaggacccatcttctaattctgtagatataccacattgcccgaattgattaagaccccacgagtacagtttaccgtccgtggaaagggcaaatgaatgattttcacccgatgaaatatactttatgttatccaacccaaatggtcttggatctaaagttctcaaacgagaacgttccaaaattcttctacctaattgttgctgttgaccattaccccaggcgtaaacaataccagtttcatccaagaacaatatatgatctttcccagcagccatttgaacaatcttggctttcttggagaagttagggattatccaaggggttttctggacggtaatctcatctctgtagaaacctaaaataccttcgttacaacggaaggtaccccaagcgtaaacgtcaccattttcaaatagagcagcagatagattgtctgtggcagcaatctgtacacatcttaattcgtccaatggtaaagagtctctaggaattttagttggagtggattcaatttcgttgaggtcaccatcttcatcatcatcactatcatttgcatccatatctttcaatttttctacagctccgctagtgtctctacccaaagcacctgagtcgttagtcccccacgaccagatgttattgtcagcgtctagcgctagggtgtgcattccacctgcagcaaaagacacaattttagcctcatcacggggcaaaaggggattgagtctaggtctcttaacttctttgtttttagctagaggacccaagcctagttcacacattgatccagttccccatacaaaaatgtcaagtggaacaacagatctatacaaatgtttataatcatcttgagaattgatgctaacaaacttatgattcaaagtagagtgtaaatgcttccttttaactggagtgttcgctacactagaagatcttttagacatgatttcttcagtaactggtggtcaattaaaagattaattggaagggcctagtctaatgttaattgtaactttgctaagattgcaaggaacgaaaaaaacggaaatgaacacttggtttttgatcaatcgataagtacaactcaagggagaagcttgagtgaacaagagaccagcaatgtgtcaccacgcatatgagatcacattacacttgatccattgttaattatatatacgtaaaacgaatctaagctgcagttgaaaaatctttccagattttaaagtcacgtgcaaaacaaacaacattctttgcctgtaatcattagaagaacatagctcttggctgtttacagtagcttgaatttgtgttcaacgctgtggcatatctgtttcaatcacgacgatcccgctgccaatgctccagagttatttaattgaacctttgacttctctaaacagagtatctctagcctttctttttctgtccgtgcattgactgaaaatttttgggatttgaataagtaacgatgagatgagaagcgatgagatgagatgagatgagatgagatgaggtaaatggcagataacaatcacaaaattactcattagtgtctgctttagtgctcagaatacgactagtgatacaagatttatttgttctacggagaaaatgggtaaagtaatgggtggcagcggtcgtaaacagagacacgatcctttattgaacgatcttgactctcaacatggtaagttgaaaagacaaggtaagaaaaagatcgatgctaaggatcaaaaaggccatgaagatgaagaatttgtcgatgcccagcaatctagaaaaattttgcaattagctagggaacagcaggaagaattagaggaagaggacgagcagtctctgcagacatccagccaaggaataaacagattctgtgtggccaactatgcggatgaagatgatgtagctgaggaagaggaagctcaaggtaataacatatctgactttgaaccggaagatgaagacgatttcgaaggatacgaggaggaagaagtggtagaaattgacgaagaagatgctgaaatgtttgaccaatatttcaagacttctgctgatttcaactctgccaatggatcatataaccttgccgataagattatggcttctattagagaaaaagagatggaactacagtataatgaagaagaagcaggtgatgcctctgcagtagcggaaccagctgcacctgtagatcgtacagaaggtgtcgccttaccacccaaggtgattcaagcataccttgccgttggtaccattatgcagacctggagacatggtaaactacccaaactattcaaagttttgccttctctaaataactggcaagatgttctctatgttactaatccagaggaatggtctccgcatgctatatacgaaggtactaaactttttgtttctaacttatcatctaaagaggcccaaaaattcgttatagctgtgttgttaccacgcttcagagaagaaattgaatttaacgaagatcacaacttaaattaccatgtctaccgtgcattaaagaaatcattgtataaaccggctgcctttttcaaagggttcttattcccacttgtggaatccggttgtaatgttagagaagctaccattgctgcaagtgtgttatccaaggtctctgtgccagctcttcattctgctgcagcattgtcctaccttttaagattacctttttccccagccaccaccgttttcatcaaaattctactcgagaagaagtatgctttgccttatcaaactgttgacgaatgtgtcttctacttcatgagattcagagaagtcactgatggaagtacaggccaagatgccgtcagagtcttacctgtggtatggcataaagctttcttagcgtttgctcaacgttataagaatgatattacccaagatcaaagagatttcctacttgaaactgttcgtcaaagaggtcacaaagaaattggacctgaaatcagaagagaattattagccggtgatagtagagaatttgtcagtgatgttggtaataaagctgatttaatgtttgatgttctgtagtcaatagtcctataacaatataagtgcctgtcaattttaaacaagtgtataatatgcaattatagataagacaatcaatagaatcaatctattcgataagtggaaacggtatcaattaatttcatcgaatattcatgagtctattttgtactttgaagcttttgagtgaagcagagcctttatctaaatcttggagattttagcggaagacactcataaatctggaaatacttttattacaagataggtgaccaatagaccaattataataaacgataaaagtcctaacttcattaaaaatccaattttttcattgtgatactttttcaatctggatccgagtgaagaaaggctcttagaagtaacatgcaatccgatttctgctgccttaagaacagtagagtcgtgttcgatagcattctggaaagcttccgcaccttgtcttaagcctgaaactagctgggacatgtcttcaaccagttccttctgaagatcatcctgaatttgcatttgtttgtcaaatgattcaccctccgtatcagcgctgtcccttcttttacccataagcctttggcggagctccttcaaagaatcgttgtcattaattgcttcaacattggatattatatcaacatcgtcctcatctcctataggcacgtcgggcgttgcatcgaaatcaacactatatcgccttttcttttgagattcctgatatgcatcatatttctgttgcaacttagaagctttggagaaactgatagagctaaccgattcctctagtctgctaaagtttttctggtatctatcaatagcatcagaagacggatcatccaagttatcctttatagccagttttctcacggtatttaagtttgtggccagttttgtagatataagataatggtaaaaagggtcttcgtcatcttgaaagagcgaaaggtccctgtaataatttttgcgtagttgatcacttaatgtgtctaaatctgtcgtcatattccgtcagttaatgtcctttaacgaggcgctatccctttttatttgtgattggaattgtactaagtattattttaaaggctatattacattttgttttatgtcactaaaatattatcccaaacctcaatcaaagaaataacagagctgtctgaatgaaagtcattcactctgaagcatgacccttgccaacccttacaaaagcgcatgtaagaaagagtggaccgagtgctacttaatgtatctaccgatggtaagtataacataaggctgaacttggttaactattgctaaatcttattgatatacaaattcatacgactctcataatatttcagaggaaactactgaaccaattaaatgggtaatatttccgcccacctactatcaaactacaaactgtaggaattcagttgttgttagcgaaaagggcgttaaatgggagtatcccagctctgggcatcttgagcttacttctacatgcgtggaataagtctgcgccatgataaccacaacgcgaaccataattgaacatgccgaaatgtgtttaagagcccttgtttgctgagctaggaaccaaaaagataaccacaaatgacaagaatacttatcaactggaccatgtactgaggtcaagtataaagtaaaccaactttaaccaagttttgtatccttttcttttggttcatcaaatttttcagtaaacaccgggtaatgcagtgacaagttgcatgctaaccataggtcttataaccggaagcagggcagctaaggaagatataaaggatatgcagttacatttccataatgaatggggataatagactgtgcaaacagtggatttatatatatataagagtttaggatgaatttagatagtacttacattaatcggaaaacatggaagcctttttcttactcttcttgttcttcttgttatgcttcttaccattttcgttggcgacggtttgcttatggaaagggttcgtaagtctgccttgaacaccgttcaaatggaagaaatttttgtcaagttcatcagctacgttgtacaaggctgcttgtttaccaccatggttgacagatttagcttgtactttatcaccatcaccaccaatatgagcagagaacgttaatcgacttaaatcgcgagcaagatccaaatcttgtatacctttgtgtttggcagcttctgcaagttgctcttgtctgttgataggtaatttactgaacgtgtataaatctttgttgaattccttacattcttctctggtatatggcgtatcatcgtccatgtgaggcggtggattaatgtacaggagtttaccgttcacataatctttgagaatgtaacgagaggcacgagattcatctgcggcaccaaaaccttgtgtcatataaccacgagctctggcataagcaacgagtaattcttgtgcagttggtacttcaccattcccaccctcttctacggatttggtctgaatatggataccgtaaatggcttccaaaaagtatttagggaccctttctgccactaatgtcgatggcccaatatagtcacgtaactgatcgatcggtagaacaccgttacacaccaattcacctttattgtatgcaaaattagggaaaactagacctggacagtcgcataacgttaccttatcagataacttgatagtttggaaatgtttggtcttaccaggggtagaagagacagaaactttcttggcacccaccaaggcatttatagtggaagacttaccaacgtttggataacccactagacctatttgtatgattggctcttgaccgggcaatggaggaagtagcggatcgtttggcgctttatctaagaacaattcttcaagttgatcgatcttcagtatgttaattttatccagaatttctttgttcacttcttccccatcaagttcttcaatttcttcctctgtagccagtatttcctcatcgtcctcttcttcaacgtattcatcccctagttcctcttgtctctctaatatttcattagccttggcagcagaaaagaatgtaaaagagatgcccctcgagagaaggtacttggcccaaataatacgttgctttcttgttaataaatccgctttgttgatcaaaagtaaattctgtttcctgtcatccacttctttcacatatttctctaaatctgtggatctgaataataatggatctctggcatccacgatttggactactagatcacatcgctcaacaactctccacaactgcctccaaacttcaatgtttctctcgaatggagtcaataacaaatcctcgttgtcttcttgcaaataggctaatttacgtctccattccaagaatgcttccttttctaacctttctaattcaaatctggtcatagattcattccacttaggccttcttgggacaatcaactctctagcatgtaatctctgcttctcgttgatcttacttttctgctcattggtcaaactaaatccctgggatgtggctgcatcggcaccgttatccattctgatgatcttgacattagaatgtctgtccgctgtgaaatccttgtctgctaactcagcagtactcaaaaattcatctaatgcagattcctgagtaacagatctcaattttacccaattagcttcgtgcttatcggtagtgaaacgttcttcaccatctggcaaatactgcacttcattttccttacgtcttgcagtttgaattgccttacctaacccaatagtgtttttattcttcctttgaataggctttggaccctttggaggtttccacttctttgttgtttcctttggtggcatgctgctagtccgtgttgcttgtagacctgccgttaactgctaagattgttgtgctgatgctttgcttatgatgagatgagctggttaacatattaaaattttccgctagtacgtaaagtgtaaaaaagaaattgtgtggtaaacctgaactagaacagatggatggctcaacaatctttacaaaagcacccgcatgatgaggatgcagagtacgactccaacataggtattgcataccaccttagaggagcgacaaaattagaagtcaagagtttctgcagaatggaagaaactgcagctgataaaagggttaccacgcgtcttcctccatgttgcttgtgtattttaagagagaaatttatcattgtgggtacctatctcttgcataaggactcaggcaatcgaactggctctattgaggtttatgataaagaattgaaccttctttctagcataaaaacctatggggcaattttagatttgaagctcaatccattcgatgatactttactcgcaacagctcattcaaccggtaatatgattctgtggacgatatctgtcgacgatgataattcatcaattgatatcaaactattgaacaaccttcaagtatttgatcccacatgtctaataacgtctctccagttttctccattgctggataatctcgtacttttaaccactactaatggggattttgctactgttgatatcatacatggtgaaatatgctttatagaggaggtggagccatcgtatttcgactcctcaacaataaattatattgaggtgccaaatgcagacatcaaagttataaatgttcagaatgaccatgaacaaatctttcatttcaaacattctttggagtgctggaccggcgagttcggctgtttggctcctttgaaagatgttgtattcactggtggtgacgactctgcaattgcagctcatgatttgaattcaggcaaaaagatctggtccaattcaaaaattcatcaagctggtgttacggcaattaaggctgctagggagacatttagaggcaacaagccaacaagtttaatcacaggctcttatgatgaccatatacgatcctttgatctaagaatgctctcagaaaccacaatatatccagggacagacgtccctgtggttaataaatgggaagacaatttacagggtggtgtttggagattctcggaggccccaacgaatgacggactgtcaaataacagacttatggtttgttgcatgtataatggtgcgaaggttgtcaacgtccaaaacgatcatttcgtgaccgagcagtttataaaagaagggcatgaatcaatgtgttacggtggtgattggagtaaagaaacagttgcaacttgttctttttatgacaagtccctacaactttggaaaagtccaaattaatacacatatagttttaaaaggaacgaaaaaagcagacggaattgagacataattgatgtgttctcacttcgctgtttcgatgagcttcagtatgtattcttttttaaatataggaccatttgtttcatcttattaacgcacgtgacttcaagtatcttcatcctgcaacaccaaaacacgaaagttttggaaaaactgggtaagtaatcctttgatctaaaatttaattacttcagttaatataaagaaaaagacttcaaagattggtattttgatgaagtagtaggagcttcataatttctgatatctgaagcagcaaatttgtttcactggttctcacgtcattaaagatggattcacctgagtatttggagaaattaaaaccctttcaagagggaattcccaacagcattgctgagaagaaagaaagatacttgctaccactgcgtgatttggcatcagggaagcgcaaatttgatgaacagggaacagtaaagagattcgaacatttgcttgggttatctactttattcagacatttcattgaaaggaaagctgccaaggatcctagatttagagaggtattggacactattgataatgtcaacggcaaagcaaatggtaagggaaagaaacatacagatgcccgcagacgtaagactgaaaaggaagaggatgctgaacttatgaaagatgaagaagaagaggaagaggagcttgctgatgtcgatttccaattcagagaaagtccagcttatgttaacggacagttaagaccataccaaatccaaggtttgaactggctagtagcgttgcacaaaaatcaactagctggtattctagcagatgaaatggggttgggtaaaacgttacaaaccattgcatttttgggttatctaagatatattgaaaagaagaatggccccttccttgtgatagctcctaaatcgactttaaacaactggctcagggaaattaatagatggactccagaggtaagcgccttcattcttcaaggtgataaagaggaaagatctaagctatgtcacgataagcttttagcatgcgatttcgatatctgtgttgcatcctatgagattatcattagagaaaaagcctcctttaaaaaaattgactgggagtatgttgttattgatgaagctcatagaattaagaatgaagaatccatgctatcccaggttcttagagaattttcctctcgtaacaggttacttatcactggtactccgctacaaaataatcttcatgagctttgggctttattgaatttcttattgcctgatatttttgctgactcggcaacctttgatgaatggttctctagcgaatcatctgaagaggataaagaaaaagtggtcaaacaattgcacactgtgctcagtccctttttgctacgtcgtatcaagaacgacgtcgaaggttcattactacctaaaaaggaattgaacgtctatgttggtatgtcttcaatgcaaaaaaagtggtataaacagattctcgaaaaagatatagatgcagttaatggttcaaacggtcaaaaggaatcaaaaacccgtttgttgaatattgtcatgcaattgagaaaatgttgcaatcatccatacttattcgatggtgcagaaccaggtcctccatacactactgacgagcatttagtatacaattcagccaaattgaaagtgttggataaattactaaaaaaattcaaggaacaaggcagtcgtgtcctaattttctctcagatgtctcgtgtgctcgatatcttggaggattactgctatttccgtgagtacgagtactgtagaatcgatggttctactgcacacgaagatagaatcaacgctattgatgactataatgcaccagattctaagaagttcatatttcttctaactactcgtgctggtgggttgggtatcaacttaactactgcagatattgttgttttatacgattctgactggaatcctcaagcagatttgcaagcaatggatcgtgcgcacagaattggccaaaaaaagcaagtgcgggtattcagatttgtcactgacaatagtgtggaagagaagattttggaaagagctacacagaaactaaaattggatcagttagtcatccaacaagggcgagtcactaacaagaagaaggagaataaaaatgactccaaagagggattactttctatgattcagcatggtgctgttgatgtcttcaagagcaatgacagtagtgccatgaccagtcaaactggaacaccacatccagatgatgggaaggacaaggatgaagatgtggatttggatgccttgctagcacaatctgaagataagaccaggagtttgaacgccaagtatgcaactttgggtttggatgaacttcaacgattcaaccaagattctgcatatgaatgggatggtcaaaattttaaaaagaaggttgaaaaggatatcattaacccactatttatcccacctacgaaacgtgaacgttcaacgaatgctaactattctgttgataattattacaaagacgtgttaaaccctggacgtaacaatcaatatacggttccaccaaagatgccaaaattacaacctctaaatagccaccaattattaagaccacaattaaaggctatttacgaaaaggaaagaatgtggattgcaaagaaaaacaattatgttcccaaccttgatgacgttgtaacaacttatggtgacgtgaaagatgaagcagaaaagaaagataaactagaacttctaaagctatcgattgccaatgcagaaccattgacagaagaggaaactaataataaaattgaatgggagaaagaaggcttccataactggaataagttggatttccgtaagttcattactgcatcaggtaaacatggtcgtaattctattcaagccattgctgctgaattcggtggtagcaagacagaagaagaagtgagggcttatgctaaagcattctgggccaatcttgaaagagtggaagactatgaaagatacgtgaagaatattgagacggaagaagaaagagtgagacgagtaaagatgaatcaagaagctctacgtagaaagatcagccaatgcgcaaacccactatttgaactcaagttgaagttcccaccatctacaaacaataagagaacgttttccgaagaggaagatagatttatcttgttgatgttattcaaatacggacttgatagagagaacgtatacgaaatgattagggatgaaatcaagcaccatcctttgttcgaacttgacttctttttccaaagtagaacgccaattgaattacagagaagaaccatcactttgctccaatgtctagagaaggaatttaataccggaattcagaaaacagatgaattaaatgatcgactaaagaaagaagatgaagaaggtgagaggttgcgggagaagttgaaagaggagaacaaagccagaaggcaagaggaggaagaacaagaagaagaagaagaagaaaaagaagaagaagttaatggcactgcaactcaaagaaaagacgaagcaactgaagttgacaccgaagtcaatggaaacagccttaatgaacctgaacagaaaaaggtaaagacagaataaatatcataaacccttctgaatagagagaatccattgtataatactgaaataatataaaatttgttgaaaacgaaaacagttccttagtttttatgcaatttttgattcattttatcactcttattattattattatcattattttattatcatagttattattattatcagttggttatatttactttgaacacagtaaattaattagatatagaatagaatccaacagttcaatgaaaagattttaacaacttccggaagaggatagtgcaatacattttataaatagagcaagaatggtagagtggagtctgtgttttaatcaaatttattcattcaacaatttttcaataggttcttctaacgaagatggcttagtcaaagaactgtacctttcaacaacggtacccttcttgtcaacaaggaatttttcaaagttccatttgatacccttgaaacccaacaatccggatttttcgttcttcaagaagtcgtagactgggtcagcttcagaaccgttcacatcaaccttcttcaagattgggaaagaaacaccgtagtttagttgacagaactgagaaatctcttcatcagtacctggctcttgatgtccaaactggttacatgggaaacccaacacaatgaaccctttatcctcgtacttcttgtacaaagcttctagttccttatattgaggagtgaacccgcacttggaagcaacgttgacaattaaaacaactttaccttctagctgagtgaatgggaatggttcgccctttttgtcctttggtgctaattcgtaaaacttagacatcttggtaattgctgctgttcttttaatatatgaaaatattttgaatattggatatagctatagcttattcaacagtatataccaaaatattaacaccaatatcaatcagaaacgattttaggtggacaaaagttatattatttctgtattgaaatatcggtcttgtttatatagaatcattttttttttccctgtttaattctctattacaaagaatattagaaagcagaagtgctaaggaacggaaccaacaatcaggaacagcaacggaacgacagatttatcggccggacgatgaagaactgtacattctggtaacggcgttataacagtactgtaggtatatcatataagattttatgatgacaccgggtatatctgcatcctataagatttatagattagtaaactgtcagtgtttattgctatgtgtcaaagcatgcggaaatgttcgtttctgatgcaatgtatttcatgtgattacaaagcaacggctggatgtgtgcaatttggggcttagaacttagaattgatcggtacatgataaactccaagcaggtgagaagacggctttaaaccaccaatgtggcgtaccttttagctataaggtttctatttgtcagtgtttagattgaatctcgaacccttgatgatatctggtcacgtggtcaataattacatacattttaacatcacattatgaagggatatatacataaatcaccttgccgcttgtaccacactcatacacctgaactcgttcgagtaagatgctttccataaccgaatcttaccatcatctccggtactacttaggattgtacctgtgagattccaagatacggaccatacctcgccctgatggtctgaatgttcgctgatcagctcgacgtgaaggttagccactgatccatctgcatcaatggcggagctgtcaatgggtgggccatcacgttctatgtttgcattgttatcgttttcttcgtttataatattcgtaccgttgttacgcgattcggttactttgaatattcttaatttcccatctttgcagcccgtagcgatcaattggtaccacctgcccactgatggtgcccacgcaatggatctgattaatccagtgtgacccttcaaatgtcctgctgggaccaattttccctgtttgtttctttggtagatagttgcctgatccatggcactgataactaatctttctgttgaaaatctggagggacaccaggacagacaaaaatccgattgtagatgtgatgcaggtggagtatttaagacggtaatctcgcttgtcagggtccatgacctaagatcggaagactctaacgcatcataaagacgtaacttaccatcattccccaatgcagctagccttagtcccaaatgcgatggagcaaattttacgctgaacaacggtcctgtcgcatcgttcaacgtacaaagtttttgccaacgctttccggataactcaagggcatctggatcctcctcccatagtttgatagtcttatcgtatgagacactcgcgatgatacgaccaaattctggtgcggcccaatcaagagacacaatactgctatcgtgagccttccaactttcgctcaattcccactcattcgtttccttgtctagcttgaacaccttgatatgttggtcgctggaacatgttgcgactcgacgaccgtaaaagtcataactaatatcgtgcactaggtctgagtgtcctgtcaaaaacggtttcatgatgataaaagattttatcggatttaccactagattggtcgatagaataacttcaaccttcaaagccgtgaagtgtagatatctctcaactcagctcaactctctttccctctatcatgcaacttttagctttcgttttcgaaaagttcgaagttcaatgtttaaaggattcatatatatcgaaaatcaaaacacaataatttaagaaagcgcttggcattttaaatgctaagctaaaaaagtgcttactgaagctttatatatagccagtaccagctcagggaatgaaccatgctttcttattttttgctactgtttgctattgcaataattgtatattttaaagatgtatctcctatcggatctgcagtagggttttctgtaattggctacgtggcagttgatgtattgatcccacaagtaggtgattccttcatcaagattggtttatttggcaaagatatgagtaaacctggtaggccagtgattccagaaacaattggatctgtatctgctacagtgtatttgtttatcatgttcttttcgattcctttcatgttttacaaatatttggtgataacctctggaggtggaaatagagatctggtttctcaagaatcgacggaggaacagctattcccacatagtaagttaagtgaatttttaagtgcacttttatgtcttgaatccacgatattactaggtgctgctgacgatttgtttgatcttcgctggagacataaattcttcctaccagcaattgctgcgattccattacttgtagtctactatgttgattttagcgttacccatgttttgatccctaagtttgtacaagagttaattggtacaagcaagacatccattgatttaggcgctttctattactgctatatggcttcggtcgccattttctgtccaaattcaattaatatattggctggtgtcaatggacttgaagttgggcagagcattgtcctaggcctaatatttatgattaatgatgtgttgtatttaactatgggtgtgaacggacatgctcgtgaatcacacctattctcacttttattgatcgtcccattcctcggagtctcactagcattgttcaaatggaaccgctggcctgcaaaagtatttgtcggtgatacttactgttacttcgctggtatggttttcgctgtagtcggtattcttggacacttctcgaagactacgttactattctttctaccacaaatcttcaatttcatctattcagctccacaaatattcggattggtgccttgcccaaggcatagactaccgaaatttaacgagagtgattggctaatgtacacatcacgagcagatcttataaaagaaaaaccgaagccagtaatgcaaccgatattgagacttttgcacaaattgcgattaatcgatttgaacatcgatcccaaaacaaatacaattttagattgcagtaatatgacgttaatcaatttaatgattgtgtggtttgggcctatgagggaagataagctatgttactctatactcgcgctgcaattcattattggaatatctgcgatatgtctaagacatttaattggatcactattattcgggaacgataatttatggaacatcgtttagtgttgttaaatatccaagaaagctgtatcgatagaaatgaagacagtttctccctacttatagatcagatagatgaaaggaaaagaccccatcatattatacctcattttttttatttgcgttggttttattctatagtacttaatatttatgaatattcaatcaagatgctgaaatagtacaaatgtctatttataagatcaaatgaagaggctacatgatgatgttacaaagataaatatatcttactgtattatagctgctggaaaaattctgtacgtcttttgactaaatgggatacccatgatttgacttcctcagtcttaatgctgcttactgcaccatagaattgagacaaatcttttgtaccactatgccttttctcatattcgaaacattgtaccagcatttcgaacttgtcaatatccttaacgtatcttgcttctagtgagctaatgttttcatatgctaaccagtcagacaaaatctcatcggctgcaactgagttgtaaggttttataatttcctcgcataaatacgtaatggtatcaagttctctttgatgcttttcctcctttgttactggatcaaacggtgttatatcaccgactagagattcagcgatgtcatgcactaatgctatgcgaacacattttttgacatcaacatttggatctttgatcaacatagtagtaacccccatacggtacatatgatctgcgatactctcacaagggataatgtcatggtcaatccaacctgttctcttctgtagcttcaattgttccacaatatgcaaaaatgctaacacatagttaggctgaggttcagacaacagttccttcacttcagctggaacatgatccctaggattccactccatagtcatctttgatgttggaagtggtcgtgatgaaaaaaatcgacacgaactatcaaataagttgcccttctgatgagttaatctaaatgttatcgatgattgtttactaaaatatgaaaatgtcctgtacatgtttttatagttaaacaatatgaataagtatgacacagaaacgatctgaggccaacaaaaccgaaaaacaagaaaaccgattcaaagtgtatatgcagaggcttcagttcatgagttgtcaaactataatcgaattggttattgtccctactgtccaaaatgtaataaaattgttcagtttcataccgataaaaccaagagatatatgtaatatacaaaataaaaaacgaagtaaactgatctatgcaggataatcaaccttccagctgagaaatgctgaatgacatgaaatgagttgaaaaaacaaccaaaaattgatattaaagtattaaattaggcttaatgatcaaaaaaggtttttataaatctactgacaatgaatggtgttttctgaggtaatagatccgatgaaggttgtgagtttcttgacaatgtcaaagaaatcgatgaagtaaaaataatgcagtaaatgatattgataatttcatcaatagatttaagcaatcaattcaacaacaccaccagcagccttgatcttttcttcggccaacttggagacgaatctagccttgacgatgactgggacatctgggattctacccttacccaaaaccttaccgtaaccggcagccaaggtgtcaatgactggagcagcagacttggaagcagacttcaagtattcttctctcttttcttctgggaccaaagtccacaacttgtccaagttcaagactggcttccagaaatgagcttgttgcttgtggaagtatctcataccgaccttaccgaagtaacctggatggtacttatccaagttggttctgtggtggtgcaaaccaccagccatacctctaccaccgggatgctttctgtgcttaccgacacgacctttaccggctgtttaaaatggaggttaaattacaagtgattttgtaatttatgtgtttgttagtaaacctgtggttctgtgaatgaaatgatagacttccaatccattcttatatacgatgataaagagagttgctgcttgagcataagtttttaaagacaactacagttcgagaagaaagggaaagaacctacaagatgttgaattcttctatgacatagttagcagaacacacgggctataaggtcaatattcagtgcctgaaagtgaaaacgatgaaaggtgatggatgagacaaaatactgatcgagacagcgtaaaatcaatttatcacatcggcttagatgtgaaaaccttttcttcggatgcatgtaaccatcaacatggtacttatcatcctttcattaatcactttcggaagtgtcctctgtatcaatatcaatacagaagacatccggagtaaaatatagaccttatgcaaatgcttgtgaaactatccatagaaaatcaacgtcttggttctttcattccttgtccttccatcactggaaggacgtggttcgaactatagcgtactgacaaaaattgccgtacagtcttttgtgtatgtcccacctagtacatttgctaactctttcatgttatgcctcttaaagcagttacaaaaagaactaacgaacttggcagtacaacatcttctttatcatcgcaaatagtttggataatagtatgttcgatccggaactacatacctgagacgtgacctctgtgctttctagtcttagtcaatctggttggcattgttgttagattagtgcttggtttctcaagatcatgaatgtaagacaggtacaattcataatcactactcacaaatataagttagaagcgttgttggtgattgttctttatatattcaaagcatctgtaagcttgaaaaagcggcgtctggtaattttcaaaaaattagtggtaaagtcagaaataaccagatatggtaaccatttttattttctttaaatgttaaaaaaagttctggatgtactgatgcaaaacagtcccaacttatgtatgtctacttttaagggaacttaatgctcaaaacattgaaacacaaggaatatacatcagtttgctgcagatcattgttgctaagaaatactttcgagatatacttataccagtcctacctaccgtgatctgaaaacactttgagcaaaatcggagagatatttcttcgttggctggaaatactcaattcattatttggttggaccgcttttgataggaaatacgacgaggtggccagggcggtaagtttctgatgagtactaataatcgattacttccacatggtagggccgatgaattgaataacctagaaaatgcgagctcgaacaacaagggtgttactttcaccccacaccttcttctttctatgcttgttgcttgtttaggatctttgcaatatgggtatcatatgggagaactaaacgctcctgaagattacattacttgcaaagcagagttaaatccaggatacgctgattcttttctaggtaggcttggtttagctcaatgtatacccttgactgattctcagttcggattaatcacgtctgttttcagtgttggaggattgattgggtctctagtggctggaccattagcggattcttatggtaggaaaccgatcagttattggaactgttctgttggaattcttggagcagtatgtctattttccagcaacaactatcttgggatgctgttcggaagattactggctggtatttcatgcgggagtttgatcgttgtcactccattgtttatcaatgagatgtcaccggtacatttgaaagggtctttaggatctatgaatcaagtaagtataaactgtgggattctagtgacacagtctttagctatgttatgggctaacatgttgcaatggagatggattcttctgttcggtgggttaatctctttactaaattttggtctcttgttcagaataaacgagtcaccaagatggctcgtttctaaagggaacatgacagacgcagaggatgttttatcacaattacgtggcaactctcggcaggagtctagacaggagattgatggttggttgcaagggtcgcaaccggtgaggacgtttagtgatttagaagctcatacgaactctcagatgaatctggggtccaatttgaacttggagagaccgtcatctacgagatcttcgttgagagattcggaatcgataaccgttgttgaatactggaaggatccgaagtacaagtacccaagaagagtcatcacaactatattaatggctcaacaattttgtggtataaattcaattgtattttatggtgtcaaagtgataaagaaggcattccctgatactgcaatcatcattaattttgccatttcgattgtaaatgtattaatgactttcttttcatctccattggtggaccattggggtagaaaaccactattgatctcctcatcaacgctgatgtcaatatgttcctttatgatatgtttcggtatcgtaggtaatgcaccaatgatactagttatatttgtgattctatacatcaccgcatttgctggagggttaggtccgattccatttttgattatcagcgagctttcgcatccagagaccgtgggtgtggcacaaagttacggtaccacgatgaattggatcgctacgttcatggttgggtatggcttcccagcccttaatagtgttatggatggttacgtatttttattattctcagctgtcgccatatgtttctccttttacgtgtaccgctttgttcctgaaactaaaggcaaattagattacactgacatctggaagagccatgatccaagaatcgcttatactcagtgatggattaattcttggagtctaatattagtacttcatcctattgcacttttataagctattccaatattaacctaacatatattatagataaattaataaatacataaacagagcaaaaacaatggctcaagacaaggcaccgaggtatctcaacttcatttctttcaagatatcacgatatcacataccatatagtgcctagttgttctttttttttttcgtttaatatgttacattaatgctttaaaatgatagaaatacaacttgctatttccccatgtgaactgcaggggggggaggctaaactaaaggtctcgtgagccgttcaccatatgggcacaaaacgaccagataacgttatatatacatgaatgggagtccattttctaggagcatacctactagacggatagcaactagaaagagggaaaacaagtaggagacacttagtgtatggatcaatgatagaaatgaaggctgtttttttctttcttattagtattccttaaattcgtttaatcatggaaagggtacccgctgcgttcgaccaagtccgctcgccccgtctcaacaaggtactgttccacatctaacccgtatttagaccatttgacagtaggagcctcttgcgaaacaccagtgttcttctccagtgtgaaaatcgactgaagtagctgcctctgcgtcatcaaaacgtccatcaactcctgcatgttcctacactcgtctagctgaccgtataaaagagtgagctgcttcaaaagatgttgtttcagcgttagtgtgttgttcaaatgagtctgatactgttgcaaaacattgtaatccatactttcttccataccctggctttggaattgcacggcacgggaacatctctcgttttcactagtattactaatattgttattgttattattgctattcatactactggccatgattataactttgaatatggtagaataacaacggtgtatgcgtatatatcaatatcgataccaattccaattagtaagacttttttcaaagttaggctaaaaagagagaaaggaaactaaacaatctgtccagttccttcttccttagtatagtgtatagaaccagctaaatcacactctaacttcttatccagtgccagtcttacaatcctgtagtgttgcaccgatgcggttttgttcagatcagatgttgacagttgatatcgtgctgaaattaccgaatatcaaaatttcaatgttattatagcagtaagtagggaaaaaaaaaaattgaaaatgtttactatcgccaccttgaccgtttttggctgtatctcctatttactgagaaataacgaccgaaataacgaccgaaacgatgagggagatagaacgagtgacaggagacgaagaaacagtgggtgagtagaagagaacgtcaaatgtaatagatatagttaaaactctggggcgctctttagtcacgtgactgaaatttctctttcttcactcaattactactacccgtcagtgtaggatagtcagagtacatagcaagcatcaatgatttggagacagcaattgtcatcaggtgctctatgcaaagcggcttatataccaaatacctcaccacatcatagcatttctcgcatctctggctgcggcatcatagcccttctgcttttctttgttacgtcaactcttaatatacacacattctctatacttgataaaatgaaatatcaaacctttaaataaagatcagccttttaatatgataaaggttatataaaggaaacagacaagaccaaagaattttcacaatgcagaacttcaattcccaagctgccatggatagagagttttccccatcgatagtggggagtgccccgcatacacccattagaatgaacagtatagaagaagaagaagatgctatctcaccaccgtttctggcacagcaggattctgctattactggcacaacggtgaattcgcccatgcacgttacaaaaccattggttttcagcacagagacaccaccagggagaaggccgaattcgttttatagcgttcaaggcggaaacgattcttcaagttcgttagttgcaactaagggcttcactttcggtggtggaagcgataactctacaaatgatactcaactgattaatggtccaacatcagattaccatacacatagtaaaaaaccttccttcaaatacgttcctgccccaaagttacctccaatgtcaagaaatagatcaccagtaaggcataacagatccccatcaccagaaaggaaaagtaagaggaattcactgttgttcgaggctcctttcaatttcagctcctccgcattacaaccgcctccgctatctggctcttccaataactcgggacccagtagtggtggtactaatgggggtagtcgaagcgccatgtttcgtaagggccacagatataaacactcttctgtttccatgaacttcttccaagaacctgaggttaaggaaccgttaaatattataaagtcattaccagtaccggatttcaaagatctcagaaataacttgacgtggccattgacacatatccaaatttcaatctgcatcgttgaacttctgatatcgatattcattttcaacctagggcatcagaagggatggaacttactcggaacgttgtgtcatttcctcacgtatgatgttcttggtggtatctttgccattttaacagagcttttagctaagttcgaaatctggaaaacaggaacgataactctgccgttcggcttgaacagaattgatgtattgttgtcatttgcttttgcaatctcgatttgttttgctggtttagatttgatatttcatgtgctagaagaaatagccgttctattcgcagaaagttctactgctgatcatcacgaagaaattaaccagacgataccccactcacatcatacgcatctacaccaggagcaattaatatcatggtactctgtaattatactggcagctacaatttcgttcttgtcctattctttcatctttaagacaacacaatataagatcaaaaatcctttgattacgctgtcatatttgttctatatgtcattatatcccattttatcacactatcaccgtggatgggatatgttagccactgctgtaatatcatctttcattatgagctacggtatccaggtagcaaaatggacatcaacaattctattaatgggattttctactgcatcgataaacaatactttgttgatggacatagcctcttcagattcgaatcccaatgaggtatctgaaagagtacttctgaaaaggtcaaaatcaacgttaccaattgcagcggtacaaacagaaaacaatcaatcagcatctgttcaacttgatccttcgttcgtcaaatcaaaaatctatgatgctattttatcattaccgcttttcaaacgtacatgctctttaaagaacaatgaccttctttttgctaaagtgaacttccaaatgtttatagttttgattaagattgaaatgaaaaatggatcaaatgacgatgagctggatctcaggttaactatagaaaagttggtctcagattacgtaccaaatgccgagaccacaatagaaatagagaggatgtgaatgttatcaaagtatttaatgggaaatcttggcccagttgaaaagtaaatatatatgtgacttattcatatatctaagagggattagtcttttccaaccttgcatcgaataaacctaagctcaaactggtattattcaattcgccttccagtggctcttgatagttaaccaaatattggaaaggttcaatcttgaagatacaatcgaactgagatgacttcttattgaagacgaagtattttaaagctgagttcgttttggcctgtttatcacatatacctaaacgaattagacttggctcgtctttatcaaggaattcatcttcagtaccttcagaatctaagaaagacgaaatcgcgaatttcggcaattgattcaaaacgcttggcatttttattgagtgcagagcctgatcctttgtttcgtttaaaatataagactttagagaagttaggagatcataaagtagtagcttcaacttcaagtctttaccggtgttatggaacaaagtatagaaattgtcaaccatatagtgatcacggagctcaattgattcaaaacaatgtctcaatatgaacttctcatgaatgataacgatctttaatagctcgttcaagttttcgtcgtatttctttaatgtatcgttaggcatttttgcaaatgtagcaatagtatttttgaacagttccaaaacctctgaatccatccccaggcttgacatatttaccagatgcctgcttagtacaatttctgtatccatcattatatgcaagaagactaacgcagatttttctgtctccaaaactcttgctaaaaattgtctttcaataactgtcaaaagggtcgacacttgttttttgtctgagatattactgaatatttttggtaataatgagttgtaaccaattgcgccgacgatgctggagaaaaagtccgatagatcttcagcattagagttttttacattgaattcggtgagtatctggaacaaccaagtattggtgaagttcaaataccgatatagatcaatggtgttgtctattgcttcattttcgatattcattccatatatcaacatatctctaatgatagacatgtttttctcttctcttaaaatgtggctgacaacttgagcagatttttcactcaaatttgaatttggaccatattccactagcattctcactaaagtgtccctgaatgtaggtcgactgaaaagttgaagagtgatttgtttgaaattcctcttgacaaaggcattcttttcattttcgaaatttagaccataattaaagcttacttgtgacactaattcacataataaatcaaaatgtgatgtcttctgaattacctcaaaacttagtaattttaatgaaataagttttaataattcatgaacagtgaagtctcctcttttcacaaaaattgacaaaaacttattatactctgaggcgtgtgaggccttgcatagtaacaagagttttctacaattggattcatcttcgggattatgaagaacctttttaatattttgctggatcacactaggaaagttctgctcttcaaacttcgtattcttattaccggttatttccaggtataacgacaccgtttcgtttggcattttagtaaagtgatctttccggtgtctctctaactcgaaaacttcagcaatttgattctgcaacgacgagtccatttcaatcatgtttgcacaattcttaacgaaaaacttccaaaaactcttaaaatttatcaattcaaaagctgctttgtcttttatccgtagatccctcatataactgtgtaataatgtcttcataaataaaatatgatcattgataagtaaaagaaaagctttgtccaaataaagcaaaatgtcagtgaatacttctaagttttcaaggtcatcaattaattgatgataaacaatatactcagcccacccaaaaaagtgatgtaactctcctagattgatacaaaaaagttggaatgttttgatgatcttatgattattgaccttctgaagttccccttgattaaaacagatttgagataaataccattcggagcacataatccgtatgcttcctggatactcctcaagcctttcaaaatcaccactaagaagtttaggtttaaggctttcaaagatcgacactaacttgtcaaaattgtacttctcataaaagtgaggagcgtactccataacattctttaacaccatgttatattgcgacttcataataggtgatatctttaaattgataaggagtttacagtggaaatttttattctcggattctggcaaatagagtacaccagaacttatcaaacgtctgatgtatgttgggactttaattattccataaccaataaagacattcaaaagttgatgcaacttcggaagccatacgattttctgcaattctaactttgataatttagaaaaatggaaaataagactccatataacatcctcaatgctgtattcttggaatgattcttgagaattgatttttaaaactaatattttcgcaactaaatgacaactgtcatatcgatgcttacgtgaaggattgattgcccatagaataatttcaatgacctgttccattttcgtaattttttggtcaataaataagctccactctgagcctgaaaggccactatctaatacaccgagtaattctgggctcacattcttgagattcaaaatatttcctgagaaaacattgtctaaggtaagttcagtgctgaaaggagaggtttctcgagaaggttccacatcaagggatcccaaccgtaacgattcattcctatatgatatcaatttcaatttcttttttaactttggggtctcttcatcagagacattctgaagtaatatttgatacaagtaattcttatagatgttccaattttgctttggcatgatgaacgcttctaaggattgagtatggaaaatatgggaaataaactgccgcaaccgtaataaaacagactctttgagttttgaatttctctggacatcatttatgatatacttcgagtcattaatcatacacttggactcagatatgatgtggtactttcgtaatagaatttctgaaagctttattatcaaaaacgatgattctatttctgtatcttcttctgttgtcccaagaattccactccagaagatagaaaggatatgcaatgtcataggatagaattcgaagctctctattttacttaaaaaatctaccagccattgatgcaaagtagatctgtttaatagttccatttcataacagttacctagaatcttcaaataatgagcgatgcgtagcttccaatatttcaactgccccggatcattgtaatatttactgacttcaaaaaccaatttctcaaggataaggaccatattatcggtccagtctttgtacaaagtactaagaagctcttcatgggtggtttctcctttggcttttgagatcattcctttccattcaatagcatagcaacttttgattagccatatgacacgatatattggaacgaattgtgtgtagcattgttccaaaatgtgccttttcctaaatccatgaggaacagatttagttaatttccgcaatgatgtgttcgatgagcttaattcctgaagccacagattcctcttttgatctgtaagcgtgactctgttaggcaaatgaaaatcttgaccggaccatttagtgaaccttgtactgtcttctatgtccagtgtacttatcctattaatttcttgttctcgtatctcaataatcttggataattcatctcctaacaatgaggaaactttgggaagtgatccttgtaaagctgaacgagcagaaatggtttcaaagtttaccctagaagcagtatagtagccttttgccacgaactctttaagtatcttatcctcctctttggtgtgaatccacggatcaaaatcaggatagatttgtgggttggagtcggtgagcggatgtaattcctccggaggagttagtaaatattttgacggtgacatcagaagtatctagcggttattctctgactacttatatgtgttaacaagcactagttaagacagtttaacctgcctaaggtactttgaaggtttatagtgtttcagtgattctgaacgatcaatcacatatcaatttaaggtaaagaaagttctaaagtggaggaaaaacactgctcgaacaataaataacatgtcacatgatcaactcatcagaagaggcaaaatagatagtaagtataagatcattagtgccttctcaaatatcacttagacgagccccaagaatggggtacagttactatgatctttttacttatttagtgataatatgctatttactgtctgcttctttgctggtttggagttgtttgatacaacccttgtacgtatccttcaaagtgtcttcaatagagaataattcagacaacttttcttcgtcaaggtaagcagatggttgataaccatcaatgtcacgactgaggtcagtgtcaatatgttgtgaccagaatttctgttcacccttaccaactagaaggttaattgctataccctcagtattagcccttgcagttctaccacaacgatgaacatattgttgagaggagatcggtagatcatagtttatcacatgagtaatttcatttatatcgatacctctagccattatgtccgttgaaattaaaactgatttcttttgttctgaggatgcaaattcctgtattagttttctgctactacccttcgagatgttcgaatgaattgatgaaaggaacatattatactcatcttcaattattcctgatcctaacatggcatgtaataagctttctaatctgatcgaagcttcgttactcttcacaaacactaatattttagcgtttctcgaagcactgctcttgatgtcgtgtattattcttagtaagagtagtggcttgaacagactcttagcagtaggaatattgacattgagttcttgcaatttcttaggtattgaatataatttaacagaatctgtgaggaagatcttggggttgtggagatacaaattgtacaacttttctgcattcgtagtcaaagtagcagaaaagaccattttgattacgtttcctggacgtttatcctgcttatcgtttgtcaaatggtggaaaagcacttggttccaattttggaatgactgatttaatagtcggtctgcttcatcaaggactaagaacttcaaagtttttaggtcaaatgattccatctgcaagtgatcgaccagtctgcccggagtgatgattagaatgtctggagagttatacaaaaatttgttgtgttcttctttcaaggagttctcgagtttcgacattgatacattgagactggtcccttgacttagtttagagagacaatcgtagacttgatgaattaaaattttagtaggaaccaaaattattgccctaactttattcactgttctagatctcaaaatttgaaccaaagggacagaatatgctaaggtcttaccggaaccagttgatgcgtttactaatatatcaccaactcgtcttgtgaaaagttttctgtttgctttaaaagatgagtttagaagcgggagcactttatcgaatagaatggtctgaatagggaacgtttcagatgagaaattggaggtaatatttttaagcagacgtgcatctaattcaccttcgtagctatcgaattgtttaaccattttactatcgtaatgaattttggttgctgcatcccacgcagtggatttatatgtagacggatctagaagcttcaaggcttcattggtcactttggccggttgaggaattggggtaagactgtgaacatctttcatggatacgtcctcatcgtgtacatcgttgtcactactgaccttgtctgaagcgctcaacgcaccttgcagggaaagagtctgttgaaatctatttaatacggaactgtgctttgcatcaactgattgctgagaagtttctgtaggcgcaacagatgcaaccttgttttcatcttgctcactaattgtatcggaatcatcctcactgctggaagcatcatcctcactgctggaagcatcgtcctcaccagagccttcatcatcagtttccgcatctcttttcctcttttggggcacagtgggttcttttatttgtgtgacttcagctgttagtacattttcagtcaccttagtaggatcaaaccttgcagcaaacatgttattgactggatgctatcgttatgctgtcgctatgctgttactgaccttctaaattcctgaagctcatcgcatcatattacatctcatcgccattcgtctattattttatttcagaacggaattcataaaaaatttcaatctgtaaaacttgaaataacgacaagatataatagagttaagtcactaccatgatatcagtcagccaaaggttccagcagttagacaaatatctcgcgtctacgataacactcataacgtcataaaatgttcccgtcattgagattactatcacgttctgtatggaaaggtccaaatatagtcccattaccaataaaagaagcattggccaaaggtacgcccattagaacaaatgccagatctgccaccatattacctcaatttgtcggactgaaattccaagtgcataatggtaaggagtatgtcgcgtttgaagtgacagaagatatggtaggaagtaagctaggagaattcgtaccaacaagaaagagattcagttatactcaaactaagaacaaatgatttgacatttatgaaaagcacaaagttagtcagacagcagcatgtatataaaatcacacctggaagttcatgtaccaccgtgtactccatacgtaactgtatctattactaagaaatgatttattgaacaagtgctctcgattaattgggagttaatggtgtttctcattgttaaatagatgcaaatgttaatcataacgagtactatatataataattgaagtaaaatagaatatacactctttacttgaggtttcttttgaatttaatttatgattaagtttgtggacttttttcaaccactagatctttctccaccggatacaccacttagtagcttttcctctctaatcgcaccagtgcgatcaatgacaggccaatttccccagttcggtaaccgcagaattacgcaagtagcattatcagaatgtttagagctaatagccataacatattgtaaaacttcctgagcacagaagtgtggagaagcagttttcaaacctctattgttcactgtggaggtgatgagatcacagagttcttgatcgctcatcaattcagttactccgtctgtcactaaacataagaaacattcatcaccaccgaactgcaattttgatctttcagcatgtggtaacattttggttggtccaatgaggtacgaataaatgtccggctcgcacgttagaccatcacgttttccgatccgatcgccaaaggatcgtgtatttgcaaaattgttcaaaaatctagtatcaccgaaggagtcagtttggaattgacctccaagtcttctggactctctacttgatgaaggatgatgaactttagccaaagaatgagcaataccattcttgtcacaaagtataattttagtgtcaccgatttgagttacagccagttttagtaagccctgtggtgcaatgaaaaatgattcatcgtaacattcttcttcattataagaggttaaaaaaaggcttgaagcagtcgagccaccagtgaatattttcattgcttcttctggttctaaatccgaagaaaatccacatatttcatttaagtcataattgaggtaggatatgtacaaacgtaaacgttcgtattcactcaacaagcttgtcttgtcaataatgtttccccatttgtcaaagatcattcttgccccattttttggcgctacaccgtccgtgagtaggacttgctccactttagtgttacattttttgatatacctctcatagtactcctttctacctttgtatatcctcgaccagtacttcccccccactaagtcctgatatttttttaatacagcgtcaaactcttgtctgatggggaccatagctgttatatgatcgtgcaaacctgaagccagcatcttagagacacgatctcctccatgaccgtcaaatatagaaatattcaaaacgtttctctggggaggtaattctttccaaagtttcatcttagtagcgatcgatttttttgagtttaacaacgagctttcggctatagttgttggcaacttcagaatattcatagaataagaatcctcgttgtatagtctattaatccttgaagtcgcatgcccgatgaaaccaggatatttgttcaaatgaacccttaacatatgaggttttgtttctttcgaagcagcatggcttgccgctgtagtttgtagagtcgatctgccagctgtcttttgtagaagatcagctggccttaggtgaatgaatgactgggttttacccatctcgggttggctataatcacaatcgtgttcaacttaacacaaatggtaacacaagaattagcctcacaatatcttataaccgaataccccagacatataagaaaggttcaagaatgccaattgaaaacacttctctcgtgtgtggcggatgcatcaacgagccaaaaaaaagagccaaacccttgtatattcactagactttattataactagatttattttcctttaaagtgtacctactgtttttttttttttttttttttttttttttttctatacattccgcaatagtgcttcaacactaccctcttcatataggaaaccgtcaaaatctcactagtgtttcattaccacatgctagcgtgatatggaggtgtatataagccattgctatcgttaactaccgtatatggggctatcttgacgcattttgccaaatagtgacggaacggctgttactcggcagcagacaccaggagagaaaactatctgatcttatgcacgtgatacaaaaactaaaaaaatagacagtcgctttaacaccagcctacctaattactcgagcccggaagtcaaactaccccgcaatattctatcacgcataattcaagtagttggttcaaacaccctatttacctgcacccaccttacagcttgatcgtccataatccagtatagttgtttgatatttcaaaataggaaatacaacaactacctcagtaaggacttttctcgtaattcggaacccgcatagtgcagctggtgttcccaacgaaatgaacaaaatcttttaggttaaaagatctctcaaaccatgcacattttctgaacaatttcccggacatcagcaacaacacatattcgatcacatgacttccgaatattttcaactatgatttttcatcatcagaaactgacaaaaaattatgaagcaaatgttgaattgaaagagttatatcaatcggtcagtgaataaatgttggcgtaagttcaactctgagtttgacttacgtgcactggatcttaagaaacaatcctgtcaaagataccaatgttcaaacaggttttcggattgagcagtagtctgactagactatcgttgcgtaatgttcgttcaagcatagcatttgcaccaccactgcaacaacgttctttctcatatacttcaccaatacaagccacgttgaaccaaataaagagaggggtcaagcctcctggccgtaagaagatcactgaatccccagatttggaggtatgcccgattcgtaaaggagttgtgctaagagtgatggtattgaagccaaagaaacctaattctgctcagagaaaagcttgtagagtgagattaaccaatggtaacattgtttctgcatatatcccaggcgaaggccataacgcacaagagcacagtattgtatatgttcgtggaggccgttgccaagatttacctggtgtgaaatatcatgttgtccgtggtgccggtgatttggccggtgttgtcaacagaatcagctccagatcgaagtacggtgtgaagaaaccaacaaaggagtaagataccaacagtattatattctgaattatcaacataaaatatatacttatgtttataaactagaccttcatgtaaatatgcgaataatctatctactggttgctcaatctttatggccacgtgaccgaaattttgttcggatggtttttccatcatagaaaagtgctgaaaatttagttaacaacgatttcaacgaaaaggtgcccctattggaacaaacagaaagaaagattcatcatctgcaaggaattgggaaatttcgaagagactaaacctgctcagtgttgaggaaacttacaagttgatattgttccaagtcaattgaagaaaagctcatagacttgttcgaaaaaaaagcctgggtgaacacttgtgagccttctaatatcaatacataataatgttacaccttaaaccatacaacctattggtccaaaagacattaacagaagctttggaagcttacaacaatgggtctcctttaactttggacagaatcatctccgactttgattatacaacgttacacatcaccaacgatggcactgataagtcgaacctattagtttccatcagaaccaaggctacgcaatcttgtaatgagagtgggaacgatttacaagggttcttgcaggcaaaattcgatgaagtaccaggtttggctctatcatctgctaaaaaggaggccggttacgattttaccattactgttgatctatctcaaatcactgcgcaatctattgtgcaagcatctttgtttaagatccttgtaatgtcatatccattctatttagcgtttggccagagtaatgctctttctcaattgaatgaaatagaccaagtggaaaaatcaaaggaggccagggctatggttatcaaatacagagatgatgaaaacatatacatcaagccgtcctttgatcgtatcactgttatattcgaaactatattccaagatgaaactgacaaagttttcggtaaagttttcctacaagaattcgtagacgcaagaaagagaaatagatccatccaatctgcgcctcaagtgctattctcccatgaaccacctttggaaattcaagaagtagcccaacaacacgctcacgttgcaggtgctaagaagtctaccaggagattcatcacatttgtattgttcccacgtcactactcctccgatgaactaatgttcacatctgtgtcacagcttgccctattcaggaactatttccattaccatatcaagtgtgctaaggcatacatgcattcaagaatgagatatcgtgttgatacattcatcaaggtcttgaatagagcaaagctagacgaagaaactgaatccgattcacgtagaacaatcaccggtagaaaaatggtctactaagtagaaattggtttcaataatgtgtttaaagtataaaatagaatgctgccgatgtagcgatttatatcacgtgacaagtagatgatcctattcagatttttttccctccgtaatgccatgcaattgctgggcaataaacgctcgagccttgagtcagttctaacacaaccaaagaggaatggaaaaaaaaaaaaaaagaccgggtaaaacctacctgagtggaaagaaaaaaaaaaacaacgcaactccgagtcggaccattccgtcccagttttagagtgcttgagaagctcaagaagcttaattttcaattttcctcacccttgttgcagctgcgaagtaaggcacaaggtaaatggtacatggcctaaccagagtactaacgccggtcaagtttgggctggaattagcactgccctgccttgccccttcctttatctgtccaaaccccacttcacaattcagaacggaatgacagctgggcaagcctatactgccaatgttcgcaaacttgcattctggaaccaaaaccctacggccttacctgtttagccattccttacatggtaatgccatttgtgctttttttttttccttcattaattctacgcccacgttactgggtcttacccaaacggaatatattttatgatatcgtcggcaatttgggatgctattatccagtactccatcataatatacctcccactttgcgcacggctcataaaacctacgccaagttctggtagttaccttttttttttattttcgaacttcaaaatggctcaaaaacggcttcaaaattgaatcaggaaaaaaaaagcatccaaagttatggaaaatcccatacaatgaaacgacgacacaaggtgaaacaagaaccggtttgaatctgtcaaagcaaagccggagtgaagaaccagatagcaacgcaatgtttttagatgactgatcgtatattgtagaattcttttttcgttttccgggagtgcctaagtcctctttcatatatcgcatagccttccggttgcagccgcaaccaaatagcaattgactggggaagaaaacccaaccactgatacaacgattcagaatggaatttgtaaaagcatgacccagtaactaaactccagcagaacgagctatgtcattgatatatacattaaacaaggtagtgttttttttcttatctttatttagtatgtctgacctgacactgactcaagggagtttagcgctcattaccgagtcccttgttcctttaccaggcaccagctgctaacacgccatgagtactaacgaaaaagaaatctccaacatggctagatctccggtacagcaactcgtatgcgacagtttatgagctctttttttttttttactaccttccctctcgctcagctatacttaactaatttctttcctttccttccagagcttccaagcagttttttttttttgtttttgagtgattatattcttgttgatctaatgctctgcaactgaaaggagaatgccgaatcatttttccatcctttgggaagggcaacgagtgggtatgctgctgcgactttttctgtaacggtttggatttcaccgtttgtagtgtggcatacgcaaaagacctgtccatgtaggtattcatcattaatatggaacgcacggcttgtcctcgggtttctttagtttggtttttttttccctcgaacaagggtgcttgctcctctatgtgtgagtttgagtgtgggatggtcaagggagagagcgtcggctcttacgtgcaaatgtgaagcgctacttttggacccgctaaagcctttgattttggaaaaataaaaaaaaaggtaagatgctttagccatatatatatgtatatatattgagcattaaagtgatttacaggtatgtatggtgttgaaatacggaattggcgtatgttttttgtgtaagctctgctactgtacgtatttttttgttatcccataatcagacatcaaacggctgcgatatttttgttgtacttcctaagatatcagtactaatataatattctatggtttatattattcacttgggtaacgaattctaatagcatttacgattggaaaaataaagaaaaggaaaatatggacgttttatctcactcgagcgtcaacggttccgatcatgtacaaatgatccaactgccaccaatttcatcttttgattctttgatcagagctgcttcggtaacagataacaatagtataacgtcttcaaattcgaattttaacgcaggtacgccgagtccaggtgtgacgaatggccaagttcagttcactgtggggtctggtaccgtaaacattgcaccacgtacttctcgaacgtcggtaccgaatagcttgatggcttctacgttggtaagcgtgagtccccgtgccagtgcaagtgtaaatgcagcttatacgaatgccaacactcctagcactcatcacaacggtaattataatgctgaccacgcggaaagttttagtagcagtgtcagttttaatgataataacaataataatattcaacacaatcaacatcaccatcataatctgcagcagcaactgcagcagcatcaacgtcatccacagcaaatacaacgtcaagagtcaaacaaccactctgtccctgtagtcgtctcttccggtaaaacgtttacagattctttgatgtcctaccaattcggaagcacaggcagctccggatcaagccctaacggtcaacaataccgtccatcttcatatttccaatcatcattgtcgaatggtaacggttctcatacacaatccccctttgctggtaaccctgtttcgcaaccacatcatcagataatccccaaacttaattcaggtatttcaaatatgaattcattaatggatcaacaaacgtcacctactagcgataataataatagtaatgtgcatcaccagcagctacatacacactacggtcaaggccacggtagctcttgtaaccatacacactcacattcccaaggtagcttgcatcatatgatttctccgatatcaacaactaacaatcatgcgacaagcccaacaaattcaattgcaacggttttatcaccaactacatcgacaccctcgtctacggtgtcgagtacatcaaaactctcatcgttatccacatcaagtgatctaaatacacatcttatggataactcgaaatcggctaagatgaagatcgaaaataatgcaaacatggtttccaaaaaacaaccaagaaagaagaagcaatgtcctttatgtggtctctttttctctaatttatcaacacataagtcaacccacctgtcacccgagacacggcctttcaaatgtgaggtttgttctcgtggatttgccagatccaatgatttgataagacataaaaaattgcattggaaagatgacttaaaccaagaatctatggattttgttgagaagttaaagtgcttgcatgaattaaaaggaacctataaatgcccttttaactctaacttgattaacttagatctaaaattaaagggctctgacatgaaaaccgcagatttgccattcgagacttcaaattgccattcaactggggttttctcacgttgcgacactttcaaaaaccatttgaaagctttgcattttgaatacccaccaggaacaaagaaaaaagatagagcgaacgttgcaggccattgcaaacactgtggtcagaaatttgaaagtattgaaacgtggttaaaagatcatgttggcaaagaatgtggctataactacactggctgagaacggatatccagggtaatgtgctggcacaaaaacgatctatggagtgaggaacgaacaaacataactaaaacaatatgaaacgaattatacccgggaatatgtatacctctatttccttacccaaacatacgacacataaacgcacggattgtgaatacggtacttgtagcactacatgaaccgaactgtccatatatatgtatttatataaagttatatattaatgagaaacgagattttttaataattacttcaatttactgaggttggcactaaaataattagcgaatgaaagaaataaaactgtttatgaggcaagtgtctttcattcaattgaatgtcggaagagggtactagctttatgataacgttttagatgttatattcttttatgattagcaaatcaatccttaagttccatagtatccatcatgtaaacatttaacgcttaaaaacttttatatttatgatatatttatatataagaagagagaaggagaaaaaatagagacaatgtaaatgccttttcaattttgtgatcggaggtcacaattatgattatctgtctcttcgcatccgacgtctgatcagtaaaatattcttattatgtgcctgtgaatgttgtaactgtttttctttctctcttggttaatatgcgtaattcaaaatcatgagaaggttcaaaagacgatgagagttatagttcgtaaaataatgtagtaagttgttaacatattaatatatcatgtggtgatgataagtgtggactatggaaagtaggaaagaaggtgagaaagtataaatggaaataaataggagaattggtcatgaattgatggaaactaaagaaaccaagttaattgttagctagttcagttcttcttcttaccagttccgacaccaacgttgttcacgtttctgaacatgtaaacacccttggagtcagcatcgtcaacgtattggcaagttcttgcactcttccatagtgatacccacatattctcatcgttaaaacggtaatgttcacccataaccttcttgatagcttctgaagcaggtctagcgttgtagaatggaattctggaacagtagtggtgcagaacatgtgtttcgataatgtcgtggaagatatgagggccaatgaatccgaattgtctatcaatagtggcagctgcacctttagcgaaggaccattggtcagcctcgtaatgtggcatagaggcatctgtgtgttgcaagtacgtgatgaacactaaccaatggttaacccaaatgtatggaacaaaccagttaatgaaaacagaccagccgccaaatttatcataccatatcttcaacaccaacgattgtgtcagaatacccaaatctgatagcagaatgtaaatgtagtctttatcgtcgaacacaggagaacttggccagaaatggttccatttccattttggtacgtctggataaggctgaccagtgacattggttagcaaatagtagatccaaccacccaattgttgagtaagtaattctatcaaagttctaattggagagtcttcagagaattcatcgatgtcagcaagaataccacgagacttgacgaaatcttcttttgtctttggtacgaaaaccatatctctagtaatatggccggtagccttatgatgcttagagtgggtatatttccatgaaaagtatggcactaacaagtaagagtgcaaaacccaacccacaaaatcgttgacagcaccataatcagaaaaggcttgatgaccacattcgtgtgctaacacccatagaccagtaccgaaaagaccttgaacgtagccataaaatgcccaatacacaaaccttgcagcaacgtgtagatctttgacgtatggataagcaaagacattggcaaagtaaccgataccggccatgatagcgatatcacggaacacatagtataacgagacagctaactttctattatagcattctggaggaatggcacttaaaatgtccttgatggtataatccggcactttgaacacattaccatgtgtgtctatagcgactttgcaagactcggtagtagtttcagcatcggttacgtactgagactgagacattgttttgattggaaaatgtccacaagtaatctaaaagcgggcccagttaaaatcaggaatataaattcaataccaaaaggtacaccgggtgatacagtctagattaagctctgaatttatgcagcagaaccccttttcacagccgaaacagatatcaagagattagcctgatgatatgtcccttttaaatagaactagattgctcaaatctatcactatatatatgtaaatattctataactcaaaaactcaaaaagaccaaaattgggacaatcttaatatttaaaatttaaactgcctttggttttatatattggaaatgaaattacggtaaagatttgaattaatgtatttagacaatacgccgcagcagcgttaacgagaaaaaaaagtaagaaatatatatttcgaaaagtaacggagtgcactacattgatctccctgccagcgcgcgtcaagaaagggtccacattggaagttactgatgccgttgatatccaagggcctggacttaacagggcatgaggatggatttatcactccgttgctgataccaatcgtaacacaatcttgcttattcactatatactacaaataaatactaagaacgaatatccaattggacaaaaaagcacctataaacgattgtattggctacgcttaacggtttaatgtttcaattctttttttttacgaattgtactgtggtgaaatcagcgagggacactgattctttatgaaaccaaatccaaccaaaaggaaaatgcgtcaaaggctagtagggagagaaaaaaaaaaaaaacaaaacagacaccaatgtctgatatcttgccatcgattgacaattgagcttctacaataacactggatactcccggatctctcatcaagggtgagagaatgtacagttgatcgattgaaggtgtaacattgccaacaaaactctgtagcaaatcacgcgatcaacttacatatccaataggatacctcaaaaaacagtccgtaatctccttgatgacagagaagcttacacacgcttctctttagtgcaaagtgacaatgactaccccctttctgtttctctgtaactcatcgcatctcatctcatctcgtctcatctcatatagtatggggacctgttgtttttcttttttttttttgttgggaaaaacaagatcgaggatcggaaatttctttttctaaaaaaactaacgaatttcttttcgggttcaggtgaataggcacaattgatttggcaaatctggcgcagatgttaaatgttatccgggtaatgaagaacgtcacgtggtttgccacatttcattctttttgcacttgtttaccggtatagaaacagagtggatatcagaaacgtcgtagaaataaagaggaaacacatagtgaagggacgatggccgggtagtgtaattgccagttgaaaaaatcgtacttagctccagtcaaatgagggaaaggccttagattcaaccttcgacaggcagaatatggtaaagatgtccaaagaaaaaggttcaatatcatcacttatccaagtcaccagaatatacaggtaacttcccattatgtcagacaaagatggaaccgctagtgggcttaaggaaacgccagatttcataaagaaacctttgtctcatgacgaattttttgttaagcttgaaaaagctttcagaatgtccaaggtatcgcacaatcagctcaaagtaagcttgaaaagagacttgggcagtcatcacgttcaaaaacctaatgaattggatgttacttccaatcctactggtgatatctcaaagatgtcagaatccaaacgtttaaaacaaaacgctcaaccagatacaaaaccatacagacttatcgtgctagtgagcatgccatatgatgggaaacgaacgaaattcttcactttggtagattcaaagactcttgataaattttggaaggattatgttaatgttgtaaaaacaagtatgtctggattaattaaaaagaagaagaagaagaagggtggtaagaaaaactgatgaaatattcccaacctattatcacccatgaatcataaatccgcaatcgtgtagcattataaagtacatgttatatatacatatatagatgtcaaactgcaaaccagtaatttggttttcattcgaactccacgacaattgttcccgatggataaattgtccgttcttccttgatcactgtggttggctccaaacgggttctgggcacaggtgaatatagttgaaagtcatactgatactcgtaatttggtttttcttgtgtaatatcattctcgctgctagtgtcagataataaacctgctctgtataatgcaacgtatgcgtaaatctcctcaattgttaatgaagcatcaaatcttctaataattctttcattttctagtctgatgcttactctgcaaccgtcacccgatggttctggcactagtacagattttctccaagccaaccatttctttttaagttggctttcctcgattaccctatccctttcctggtccctttctagcgattcttggtatctcgaatcttgttgttctcttaataaccgttgcatttcctggtactgtctttgccttctaatctcaactaatactgaataatatgaggctaatttggcctcaaaatgagagaaatcataatcaaatagttggccctccactctggcaagcaatttcattttattattccgttggggtccaagggcacctaaaaatggaaactgtctaatctttaaagaattagcagtctgtagcccttgtggtgttgtaacatcgcaaaaccatacaacgcaattatatttggtgacacattctacaaactcgttggaagttaaaatctttcttacgtactcgaatggatcgtatagtatcggattgaagaaagatattattgcaaatttaccatcgctggaacaccgacgtaagatatcagtgtaaccacccttaatcatatttttgctcaacattccattctctacattgtacaacgtatcgaatgtataaccactctgttcgttggtatcggctgatgaagaaaggacatctataacatttacgaattggttacccaaatcatcgctgaaatgattgtcttttcttgtgtagaaatgaaagatcttgcctattggtttgaaaacttccaccgaagttaacaggatattgagcaagtaatatagtaatgttagtggaatgtataagcacatttttaatattctaggaacgccagcattcagtattgtttcctgttcaggttgttctgtattatcattgtcttcagggaatgatcctgggagaggggtaaaactcactgcaggttggttctgctgagacggcctactgaaaatgttgaataccatgttcaacagttgcagattcgtttctatagaagagtacagcctctaatataggtgaagctttctcttcttctactgaagatttaccctatggataccattgacaacttttaaaggatgtctgatattgttttttaaatgtcaaatttaatggacagacaatgatagatcatcgtgagtggaaattcacaaagaaaagcgccacggctaaatagtacaactaaggcatttaatagttagagtataattcccgatgattgctactctcaattttattatattccgaaagttattttcttcacctatggagtcatgttaatttaggtatcataatgagtatatagttttatagtattacacatgccatcagagttaatcgtgaattcattacactttcattgacagattagacatggatggttctccgcgtctattaatgaaattgttaacgtcaaggatagccagtccgaatatgggatgaataggctcaacttccggttctggcacaagtggagttgcaacaaaatcgaagggtgaattgtttcggaccataaaagaatgttcgcaaattgataaaccagccaacacataattggtatgataaaagtccgcttgtgttcccggtttatctcttaggccagggctttcttccgattgacagcatttcaatatatattgttttagggcgtctttatctatgcatactccatacccgtatgcttctaagattgcagcagttccgccaacccaaaaactgtagcaaccatctgtaagtttattgcttcttccgtttaaacctttctcctctttagtttgacgagaactacaccatgacaataacgcatcgatattgaccttatctaaggcattcaacattgccaagctggctactgcacaaaaagtgtagccaccatgtgcttcatcatttgggcagcctccgaaaccaccctcgtaagattggcatcttgtcaagaattccgtcacattacttgttagtttagagtccacaatgcctagtagtgacgctatagataatgcagtgtatacgcctctcacatcttgttcgccgactgggcgtgcagtcatgaacgcgccgctaggtgttttaagagaaatgagccagtcgtatatagcctttttattgatttctctgttatcatcgagattgtgacatagagcgatggaatttatagcagcgtatgtggccgctagatgtggtagttgatgctttccgccgctgaagggaccacctgtaggtgatatataccatagcttgtccaaaatacgcttctgataatcgttcgtaagccaagtgggattcattgttttgaaggcattgccaatccagtacaacagccatggctgagaggcatcgagtgatttgaatcccgaaggtaatggattatttaaccaatattcaaggaacatcttatgagaatccttctgcaaatggttgaatttctctggagccttttcataaagctccagacattcatttattaactcttccctttccaccaaggtttcagtaatcagccctgtatttgaagttctaatttccatcacttcttcctcatctaccacttcttgctctattgtttctcgtttccttccaagcacattggttcgaagataactcatctttttgatagccctggtagcactatttatagccattggcctttgtccagatctttgctttcctgttctcgccctctttgatgcttctgaaactggcaatttactattacgaaacctcaatctttattcaaataacatttacggtagatatttataactgagaaatgagtttaatgcatcgataacctcaaaaactgagaataaggctaaatgactaattgactgatgcccagaggagcgcaagctatgctggaaaagcaagcagactctgtgtggaaccagctgtatgagatatgctggaacttctacgtgaagaacgtttgggatattaacacatttaaagcgatagtggacaaaatagagaaaagtgatgacaaacagctaatacggtttttgatttggtttaatgatgctcgtaaaagatctaatttcaatgacaagttccaatggatgacgtcttttttgtatggtaggcgttatccgccattgggcgatgatctagtggtcaaagaaccctggaatgatttgcaacaattagacagtattataaagtacgggaatgaaccaattgacttggtcaaaatgcagccagattttactacggaggaacgtattgtacagaataggcgggtcaacaactgttctttaatatgtagtttgaccaatgctagagaggaaaatcagataaagagttatagcgtccataacgttttcaacgtgattcttcatttcaatgggtcaaatcgactagtgtcagtattacgagattcaaattttccaaaatgctctaaagacggggctgccttgactctcttctcccataatatagaagatatgttgattgagcttgcatatttcgaaatcaagaataatcggaactacgcgtatgggggatccaatacagctactgatacttatttgctcacaggatggataccagagattctcaacctaggagacgtatcatttagtgaaatacgtaaatgttaccaattcaatgccatgcttgctttaggaacagattcagtgaagggaaaagaggtaacagaaaatcatgattttgttgtgacttctgtcaattggaagaaggaacaatttaccatcctaaatcctcacggtactgaaaaccccactgtgtatacttgggacgacctaataaaagaattcaaatggttatatgtaaattgggatccatattcaaagtacactcaacgtgtaaaactacatgatcgatatccagataaatttaatgcatatcctacctggactcaaaaacctttgatgtgcattgagaacaaatcaaacagcattcaaaattgtcatctttatctagaaagacacctactagatgattctattctcgaatccaacctgacaattggtgaaattccaaggtctgggtttacagctgtctcagcggaggggaataatagtggattctgtaatatgcaactgcggctaaacccccatgaaacacgtctaatcttttatcattcagacaaaaagtgcaatttgactttccatttactatctaattctggtttggtttcaatgtcaaaatgtaaatcagatatattaactgctgagtctagctggaatatcacaaataatcagtggactattggtacttctgaatatttcaaaagtcctgttttcaaactaaaaagtgatggtttcgatgatacttatctagattttgagctagtctcgcagttaccagcgaaggtgaattttcaaatatttgagtccgatgattatgccctacaacgtccgatctttaagaatgacacatactccccacaaattttttccaagcatggagtaaggttattaaaagggagagaatactttatagtatgctccatcgctcatcatattacctctccgttcatatttacgctgcgaaaccctgaaacaaagcagtcaaaatttgaactatctccatattcgttaggatttgggggattaagatataatgaggttttgcggtgcaaaacgagaatcacaatatcagtttcaaatttcacgcggttatttgttctgctgttcacgtcagcttcgaaaacaaatggaagactcacgttacgtttgtacgagaaagaaacagaggaaatcctctttgaacaaatagaaacaaggtatgatcttagtgttaaaccattcccgataccgaatattgaacttaagccagcatcgtacgtgttagaaatattctacaatgcagatgttgtgatctgtaatctcggaacttctcaccgagctatattcgaatcggatctataatttcaacaagtacgttgtggaggtttccacccacaagcatatccatcacattgcatcacgtgatttgtatttatgtttgctcaaaaggtaaacaaaaacgatttataagataaataatgaaatttgtaacaattaaggtcataacgatctttgtcaagccgtttaccgttgatactaatgcaaaagcgcggaaacaaagcaaataaataatggcattttggcgaaatagacatgaatcaccagccatttcacaagaaagaagccccagtcctgacaggttccaaaatagtgaagatataagggaagataataataattataatgaggatgaaaaattaggatggtttgcttcgttcatgggaatgttttcattaccttacgactggtacttatctatcaacgaagatatagctgtgattgactgggatagtaagtcaaactcggtagcatggcctttaggaaatgttctaaccttccttttcttctccgtacgattattgcaggacaatgtgatagccccaaacatcaataagctaactcattctgatgatgcatttgacttttcaaaatctaagaatcttcagaaatatgattattttcagcagtatggaggttccgcttcttcaagcgaaaatttatactacaaaatgttaagacaattgcaccgcctgttttatctgctgacggtgttgttattaatcactaatatttcggtaacttatagatatcttttcgcgcatttccagacctactcgattttttattggaaaactgttccgaagtcgaagaatgtaaccaaaaaatcacttcatgatttgaaccatacctacgtcgaagacgccaaaagagactctttatgggggatgattaagtatctcttgttcaatgggtctcacgatgatgagacaaatagagcccattattatgaattacgaaaatggacaccaagcaggtttcttacatctttttttgtctcattttctccaattgcattctgtttcttgtggatgacagatgttactttcaaaactcttattccaatcattattcaccaatatgttttatggtttattgttattgatcgatacgagcagaaattgaaggatgagcagattttgagcatgtccagtgtggctgaattaaattcaaaagttattcaacctaaaatgaatgtcttgaagcaagatgcgatggttgacgcaacaccttataacgatggaatagtttacttctatccggcttacaccactacaaggtcgcacgtctttgcaacccacactttgagtgggaaacttagtaaagaaaagtataatcctcgcacagattcattcgaggatgccaattcacagcgtacggaaaactacgtaaggttctcgtaccatcaccctaagtcaataaatggtgcttatgtacgagaatcgtatcctagcagacagcatagtccgcgtttgagcccttctcgctattctcatcttcaaagtggtaatacaccttccgctccctccacgccacttctaataccatctcaacaacctcatttcgatcattccatgttggccaatgcatctagaaatcataatataagtgagagaagaaactctcatagtcctattaaacaacactttgcaaataggttactaaactatccggatgaaacaaatgatagcatacccgatgtgtctgatgacagattcagaatggatgatcgtttcagaagaggcagacaaggctatttcaatcgatctcccgacatcaattctggtacgttacattacgatgatggtgatgatgatgataaccgtatatcaaagtctccctttcggaattcatcgtcttcaccatttcggtagttattcactcaaatactcacattcattgaagtttggtgcactggaatttcttgaggtatccgtaaattatataaacataatacatctctaattactaaagacaatgagactataggtcgttccacccgaataaccaattgttgacccttccaattaaatttgttggttgttggttattcccatgctgttcctgttctcgtaacttgttctccaaatttcttaaaaagtttggaccaccatgaggagggtttgcattatgcacaaacaactgctttccatctttgacatccaatttccgagtagaaaaggtgaacccatgtttattattatcagcactttcttgtgtcccattttgtatatcagatgattcaggtccgtttggtttcatcgataaactgaacgggatttctccgatgtcatcagttttatcgattttgcacgaagccaattgttctacggctgttttgctataaggaacgcagccaattaaacaacctccataaacggtaccattctcttgtagagctctcagagcggcactaggggagtcatacgtgattttaatccatccatcgcccgtgaagataggatatttcttatgaggaattttagagtccttattttgagcacgaattctaatagtagcactggatatgttgttacctgtaacacctcttagaacctcaaggtcctctaaaatatttccgaattttgagaaatgtaatattatttggtttgaaatggattctggatatccaaatacaattactgcgctctcttgcgatttttgtcttgatatatcatttgtttgatccgctgtcggttttacaggggatttcgacgcatctctgtcgaatgcgtttcttgtgctcttagtgtattcttgagtcaaaggtatttggttagacgaaggcattgcgttcacgttagtggggacagacccgaactcatcctctcgttgccaatcatataacgattttgttgggggagcttcattcgattccacataagtcgcgatatcagtaggttgtgcaggctgcgtagagctgaatgttggcttctttgtgccaaactggacgctattgaatccggatctttgggaagagttgtcattcgaagatccatctccagatgagctcggtttagacgatctttttatcacggattgtggaatgtttctctttctagctatattataccagttttcttcctttccattcgtggcagagctctgtactagtgattgtgaactattctgctgttgttggttttgctgctgctgctgaggataatttatttgcaagtttgcaaacctgttctcttgttgcgcttgttggccaaatactgaactcatgatttaggattgtcagttcgctttctcaacaatgtttcaacagtcaaaaatgatcaatttatcctacttgaaattgaagaacacaccaaaccacagtgttaccggtgcatatgaacatgctacgatgataacagctattctcatctaatcttattcttgatgtttattagttgaaattgttttatttcaattagaatactcaaatccgggtaatgtttgccattatgaacagcttcagtgtatgtgtaaatttatacattcacgatcgataagatttacctctatatactgctttttgatgtctccttgtttgcgggagatatgtgtgaagatctgtcccttgttcgtgcaatctcttttttaccatgtcaagttctttacgcatagttacgtatcctagatggagtttgcccatgaaatggtcagcgagtcttctatccgtgtctaatcttgaaaggtaggctccacatacacggcatacctgtagcttctgttgtgcactttggcctgtgttttcgttcatttgcctgcatttttcgctgagtgtgtccctttctgtttgcagtttgttatatttacagctttgaatcatcgccttcataacttcttcgttttgtataagcatatcgatttctgaaagcattaaagcacatttggattcaagctgattcactgcttgtagaagtgctgctaatttcgaatgttcctcatgatgctgtaactttttatgtgccatttcaatttgaacatcacaatcactaagaatcttcttcaagatggagtaatgctcaaggtcaaactcaggatatttcttgcccttctttacatctctttcatattgcattttatgcgagactgaatgtatacgtggacaatgccccatgggctgcttggtctcttggaaaaggtcataggggcaatgaccaatgataaatgatttgcacgttgatggtgaagttagcccatgcgatgtggcagccgaagacataagctgagaaatcagcttgcgctgttctaaaattgcagacatttctcacttacaaatatctctgatggaagtaacaccaaactgttgcgtgcagtttggactctgtgattaactttttctgctctgttggtcagttcaacaatgatacttcttcagtacgccttttcaagtagcttgttgaaaatgccaggtttaaattctgacgacaaaatatactgaaaataaatatataataacacaagcaaaacatgacacaaatggcagtttaggttttctaaacatgatcattcctatcttaggtgatccttttgaaataatttgtagtacaattagaacatgcaagctagaaacaatggagcctgtattttctgctttagttattggaggtaatggtaatgacagcgcaattagaatttgtcgagaattgatattcaaatatggcattaaagttatcaatgcagattattgggatgccagggatgatattctatatggattggaagaatattatagaagtgacgatgtaagatccgataagtggattcttacatttgattctcatatcaacttgatcaatgacagaaaaaaaaactacgagttcgtgaacattaatacccagaactggaaaccgattctttctggcgtgaacgtagttatcaatttgactcagtactatgaacctaccattggtggcttgctttccacaccaattcaagaggtagacccattgatagatttatggtgtcacatgatcgagataatggaaacggtaaggttgacgacccattgcaccattgcgtatttgatcaataaggatactagcttcaacagaggttggggaatttttgccaacagtacgatacaattattggatggaaagctttccgtgtgtcaagaggattacgacgtgtatttctcaccaaaagaactatttcaacagttcgaaaatggaacttatgctgatataatgagatgagagaaatctagtattccagagaagatttaactagtagtgcggaaagtgggaaaacatccacaacaccgagtattatttggtgttagcagtgatgagttggcttaatattggtagctatgtggtacgtacagtttgtttgatacatataactcatacacatttctatgagtttacagaaacgagaggtgaatcaatgttaccgaccttgaatagagtaaacgattacgtccatgttctgaaatggtataaggacggacgagacttaaagatgggagactgtatagttgctatgaagcccacagatccacaatctagagtttgcaaacgaataactggaatggagggtgatttgatattagttgatcccagtcaagaagatgatgaggaagcttacgaaacttttatcagggttccaaagggtcacgtatgggtgactggggacaatctttctcatagtttagactccaggacatataattcgatacccaagggtttaatcaaggggaagatcgtagcagcgaacgatttcagcaagcctctatcgactttttgggggtttagagaaatcactaacagctattttgatgagaaatgataaagttcaatgatgaaataggaatgtttatagaagtttatgttcgtattgaatgtagctatagaagtatgttaatcggctctgatagatcttttgtatttcgaactatttaccggctatttaattgcggaactaagacttgtcgaagatcatcattgtttcaatgacttcagagtagcagaaccaagcaacaaagctggtaagaacaacaaaccagtagagaatacggtgtcaaatattgaggtaccggaatagtacttgtagaagatgaactcgaaaccggaaactagtgcaacaaataagtacgaagatacattcttcaagttgaaattaacagcaccgaaagatacccaggagacaaacaacacgaataaagtggtagtaattaccaatgcaaacagttgagcgatgaacgcattgacggtcttaggtgaactttggaaaatgtgatgaatttcctccttcggattcaatctaacaaagtttctcgcagtatcacgggtatttgttacaggatcaacaatggacaatatgaataattccttaaccaatgaattttcttctgtggatactaaaaggttcacttgtagctctgctctatcgttgaaggcatgtgcaagttttggtagaggaatggctaaggaaaatttgtcagagctcccactttgcttctttaaagtatagccagcttccaagttttcacttggaagtcctaccaaaacatttgcttgttccaactcttggtccacaacaaacgaaagcttcaatgtctctgacaacgataccggtacatttacacctttagaatcatatttactgtcaatgttattcaattggacaaccggcctttcactatcgaaagccactactgcatcttttagcacaatttcagttgcaatacagtactgaacaaacgtcaatgcactgagtattaagctttgaactctcatttcttctcttcgttatatttataccttaaacgaattcctaggaagtcaattacgcaatgatcacttctaatcaatcaatggcaaaaattaataaaaccagtgctataacaaacaaaatgggaaatatcacagatattcgaacaactgtaacaactttaactttacttaattcggtggtgttttctcttcgtgttctattcctattctaaaattgtacgtttgttaattgtgtttttctcttgaatatcagatatactattttagtatgtgaattttattattagtgtagctacaaaataaaaaaaaatgttgtggaatcagcttacccggatacgttgagaaggctgaccctgcctcctgatgacactgacgatgaccaatttcaagtgctatccaataaggactcctcaatggattgtaatgggattgtagaccctaaagtctgggaaggtgctgcttgctcctgttgtgtgaataattcgtcaccctgctgttgagctttcacttttttctcctcttttgcaggctggtttgatggcaactggtcgatcatgcctcttaactgtccttgtaggagtataacgaatctatcgtaaaagaacaaaccaatttcaaacgaggtacggcttgcgaatgatagaccgactgtcgctgaggataatacgaacgaaaatgtgaggaatggaagaacaaaaatcgaggcaataaatgcaattgaaaggaatgtcaccaaatggaaagcaaactgcggtaacgaccagggcgtcatgtatgtaataggaagggtgggaagaactggtctacttctaacgcaaagtggtatcactgcatctagaagaagaatcccaggtatgtatgtgagctcctgttactcttgttaaagcctctctttatataggcagggaaaaacaaaaacttgaaacgaatttgaaacagataattagccgcccagtaaggtccgggtaaattatgttcttaaaactaccggagatgatgattcaatggcagtcaagaaaggaaagtaagtagcatatgttactccacagttgtatgcccatgtgcctaaaaaaaataactgtattaagggtatatatgtttatttgtataatattactccaatcaaagtaccactcctaataaacctgtactggactggtatcaacaggacaatgaaacatgttccaataggaacaactaagtctctaaatattttcttctttttcatgtcaccaattataagtctcaggcagaagtgccgatatattggttgacttgatttgagatcatcttgtagtatttattcacgtaagctgcaatgttcgggtgttgctgcgcagcagcatggagttgtctctgataaatatcgtatatcctatcgtaatattcgtctaagtattctgatccatggatgaagtcgctgtcctggatacatttgaattggtcaatcataccctgctgaaattgctcattgaacttctcttcgaatttctcactcgttaatgacattattttagttagctgacgatagataaggttttgtaatcaagtgcttggggtctgagctatgattcagtatatatggtacgagtaaacttctacttagtaattgtaaaacacacgcgttccctgctcttaaaataacaccaattaaattcccttgtatgtatctttatatatacatataatcctataaacatgagagtaaattctgctcgcacgggtattaacgccgattccaatatattatgtaattatgtatgtgtggtgtactggcgtgcccgtgtaaacctagaaaaaggcttttatcagtccctatcagataagcgtccgccaacctcgcgttccgctccgacgatatcttctatgtttaccctctgttctcgtatatctgtagatatcaaaacgtatcatatacatagctcgttatagaatgctttcttaggcttgaagcgtaaagcactatttttcttctgtaattaattaagaagaccccttgaacggttttaatttgccaaacatgtcacctacagaacagtgtagtaaaagagagaaaatgaaataaagggccaggccatcatagtacgaaaacgccctttgtcaagtccgttttagagaaaaactatcagaacaaatgcggtcgatggtatttacaatatattccatctgtccgatcggaacttttacccattctctgtgtgttttttgacacacttcgcagatgatgttacccttcccgtactctttccacagccattcatggatttctcgctccacgtgacctgaatctttacagcggaatccgttttctgtaaagcatctgtcagatttatttcttgatctgcctgtgtcagtaatggtggtgctggtgatagtagtatgttttacaatgttactgtggttgtttaatgccaaacgacataacttctgaatgacattcgacattgaatttatgctcttgggttttgtagtggaggagacgatccattgacgaactatttcgggcgttattagtataatgtctcgtttgcactgtttttgccattcattaattcgtttagaaacatcacttcttcttgtcatacctattttgatcagaatttcgtctttattgtgctgccagggatcgaagcggttgttacgtaggatcaatgcttgattcttactgggtttcatcttactattgtcggttactaaccatgtaatctctttcctattcttcttttccacgacagcattctcatgtaacgttgcgtaagtatatatgtagatgtattctggggtatcttccggtatatagggtgttttggttgggctggaggttccgttgttttggttaatatgatgtctacagaactttccaccctctatggcttttagcttgcattttgatccctttcgtgtggtaccaacgcattctggggcatcatgcggcatatggggtgctttagttgcaatagaggttccgttgttttgggtactatgatgtctacagaacttctcaccctctatggcttttagcctgcattgtgatcccttttgtgtagtaccaacgcattgcgttctcatcaggttgtctatcctctattcaatgacaatggcaagtatagctttcttttctttgtatccttttcgatctcatcagatggattgttttctaaatgtcaatacacataaatatctatttcccgtcttcttgatagaaaaatctgaacatgtaaaaacaccatcatcagacaatggagaccaagcacagctgatttgaaacaatgcttatcgaacagtgtcaccaggatttaccaacatctttcgattctgaaatcagaatacatatcgtgaagcctaccgttaagggctatccaaatgctaaattccctgctgtgttagtcttctctgaaatttatcaggttactggacctgttttgagattcgctcaaacgattgctgcagaaggttacattgccattttaccatcttcataccataattttgtagattctacacccttggcgtatgatactgagggtactgatctaggtaacaaattcaagattgaaaaacccttagaatcgtatgatgaagatgttacgttgtgccttgatgtactagaaaacctaccacaatggaatggaagagttggtgcaactggcatgtgcttaggtggacatttggccttcagagctcaacttgactccagaatcaaggctacaacatgtttcttccccactgatattcactctcactctttaggtttgggcaagaatgacgattcattggaaaaggttacagccaattggaaaaaggaccaggaatgtttcttgatttttggtaccaaagatactcatgtgccatgggaaggcagagatcaaattagaaatgcagtgaaggataagtctgtcacatttttagaaatcaacggtgctcaacatgcatttatcagagacgaattcagcaaggggagattcgattccgcagtgacaaaagcatgtttgggttttatgtttgagttatttgatagaaagttgaagagtgaactaggagagttcgttgacgacaatgcgcctgtcgagcatgtttgttagacaatgcgatcctttcatgtgaagccaactatacattgatatatctatatacttatacttatactagtgcagcaaaaaccaaaggtttcaaaccagtacccataatatgtcatggaatctcgttctgagatccgtatggacacactctgagagtttatcatcaccaagtgacacagtacttctacttgggatgctattttcctcattaccctacctttaacagatttcttttatcagtaaaattttccaagcgtaagtaaagccagagagcgtattatcacagaggaagaagctttagaaaatgaaaaagtgaaagaaattgatgaattagtgaaaaaaaattcgaaatacacagtgggattaacaatatattttcaagaaaaagcttagagcagcttcagtactggttcaaggattattcggaaccaacagcaatagcagattctgatcgaactcagaagtataaaatattgaaaagatgagaccaattgttttgaagggtcatgaacgtccattaacgcaagttaagttcaaccgtgatggtgacttagtttttgcttgctccaaagatagtgttgcctctatctggtacgctatcaacggtgaaagattaggtactctagatgatcattctggtactatctggtctattgatgttgatgaaagcacaacttatgcgttgactggtggtgctgatttctgtttcaagatctggaaagttgctacaggtgtagcagtccattctgtctctaccagaagtccagttttgagagtcgaattttctccagacggtagcaaacttttgattgtacttgatgccgttatgggtcacattggttccattgttgtttactctttgatcagaaacgaaaacggtgaaatcgtgaatgtgaaggaggaaccagactacgaaattacaaccatcgagcaagctaccaaggtgttcgttgcatcttggtcctacaatggtaagtacatcatagcaggtcatgaagatggtcaaatcagtgcttactacggtgaaaacggggaattcgttcaagcaaagaagatccacgaaaagagcatcaaagatatccaattctctccagacagaacttactttatcacttcatccagagacagtgtcgcttctttggtggatgtcgacacttttgaagttctaaaaacatacaaggctgattgtccattaaatagtgcatctattactcctctcaaagaatttgtaatcttgggtggtggtcaagatgctaaggatgtcacaactactagtgctcgtgaaggtaagttcgaagccagaatttaccacaaggtattccaagatgaaattggcagagttaagggtcatttcggtcctttgaattacgtcgccgtttctccaactggtacatcatatgcatctggcggtgaagatggttacatccgtttacatcatttcgataaatcatacttcgatttcaaatacgacgtggaaaagacatttgaagtggaaagaaggcaacaactgcaaaagcaagaataaacttggtcattcatctcatatcacacatctctttttcttccatcgatacaaatctgatgacaccagtgtacattatccatacttttcacaactctattctggcactagataacctattgacgctcccgtttttcatcattcaatattagtataccaataactaaacatcattagttgcatattattttacataccagagttcttccattgcgaactctgcaaagatgtgtccgtttaccccaaaaacagtgatccacggctattggattcatcgttgttaataactaatgttttcattcattgcttatattgctaggattaatgcggaaacggttttgctagataattatatgtacattcaattacccatgtaaattaatgtaaaataacctaaccttcagacacaaacttttagaagaaacgtcccatcatatgtgagcccgtcagctaaaatgtgtaagacgtatgaaaagatctttaaaacttcagtagcatacttcgttgagagtaaacgtaaaggttttctatcgatgtaagtacttaccttctcttctctgctgccagtttctcaagtctttccttttcctttctttcatttgcagcttgttgtttttgcctcaggatttctgcatcggattccatacgtttcttgggatcaccttgtttcttttggtttttaccgctttcttgttgttttttaaggttcttctgtcttgccagctcacgctgattgcctcttgccattgttcaggtttgatcgtatacggttcttagagaaagcctaaagaaaatacaaaaaaaagggagcaaaagaacaacacaactagttaaagtgtggaggagtatggccctaccagtgagatgctctgtctctgtttcctttacgcaatccaatggcagttttattgcgtaagttgattaactaatatcatcatctcatttcaaaaatacttcaatttataatttccattccaattccatagttttctcttcgagaaacttgtcaattccataagcggtacaattgaaaacgaaaatacgaacggttgaaatctagaggagatcaaacgtgatttacggtgatttatagaatttgtatcttaattcattaacgtcaattctacataaaagtgagagatccttgcgtaaaactattcgatgtgtaaaagtatcttgcatgaaaatgtcaaacatctactgttacttttcaatttggtagtagaacgtaaaacaaccgaataattcacaatatttccttgataaagcgactatttaatctgagctgctccaatttacactgggccggtcaagggctctccctgccaaagaaggttcctctaattcaggtgttgccgcagttcctgaatttcaaaccttactttttgttttcgtattatgctggagtcttattctggaactgttcctcgaccctcacgtagtaaacatccattaagaccgaaaacagaaaacctttaggtagcgaatagggatatcacatgactaacataactttttctctagtctgttttctcagtgaggtaaaaagaggtgctcattggcttttaacgtacatagaaaacattcctacttaaatgtctgctacgattatttatgtatatatatacatatatatatatatatatatatatatgttaaaaagaggtgaataaacttgaaatgccaagagctatactttgatactttattttcgaagatggactttcagcttgatctgttgggctttatttataaccgtagatagctctcaagagatatctggttgtgttctgatctttcatttgtcatatagcttgatttctaatacgttttctattgtggtttattctgcgcttaattggattaatcaatactaaaaaaaatacagcggctagcactattgaaactcacggttctttactctaagacatattacttgacaatcaagaacttttctaataccatagattacttttgaaagatttgctgctggttaatttggatatttttcctttacctgttagtgtagtttgtggcaagatctcaaaaagatggcagacactcaagctttgatttccgttcagggaatgacttgcggcgcctgtgtcaaaaccgttcaaacacaagttggaaatgttgatggtgtcactgagtgtgaggtgtctttgttgacagaagaatgtcatgtcctttttgataaaggacgtactaccacatctgaaatattggaaacaatagatgagtgtgggtttgatggtagcttaatttctgaggaaccgctagattacgatgtgacaacaactgaacaaatttcagggattcttctcgttagcggtatgacgtgtggtgcttgcgtgaaaactgtcactggtcaagtattgaaactaagcggtgtattggaatgtgacgtatctttagttacagaagagtgcaaagttaagttcgatccccatttcacttcgatggctgaaattgccgaatgtattgatgattgtgggtttgatgccaaagtcattagtgagaactcaagctctgtacctagcaacgaaaagcgtttgtgcttaaaaatattcggtatgttgtctgaatcggatagggccgatatcgagtcaaaagtttctgagttgaaaggtgtgatatctatcgatacttcattgcaaagtgaagaggcaacagtcatccatgatgctaacgagatcggaaaccgtgatatcatagactgtatcgaagagatggggtttcaaacttttatttcaaatacattggataattctacacaattatcattactctctaaaactaaagaaatccaattctggaagaagaattgtataagaggtggtatttcttctattctaataatggggttgtacatgtgtgtaccgatgctgttcccagctgtgttgactcatttcccattcgtacaaacaccaattattggcttgttttatagagatatcatcggaattatcattactacctacgttcaaatctatgttggttcctatttttataaagctgcatggatctctttgaaacatggctcaggtacaatggacactttgatcggtctttctactgtttgtgcatatattttttcatgctattccataatttctagcatttaccataaatcgacaaaaatgccaaaagtcatctttgacaccgctgtcatgcttctcacatttatttctttgggcaaattactcgaaaataaagcgaaatcggaaacttcaactgcaatgagtaaactcatctctttgaccccgtcctcctgttccatagttttaccagatggctctaccagggaaatatcagttgaattgttacaaccaaatgatatcgtagaagtcgtaccaggaatgaaaataccagctgatggtgttgttattcgtaatgaaactgaagttgacgaatcgctaatcacaggtgaatcgatgttggtggaaaaaatcgtcggatctcaagtcatcggggggagtgtcaatggacctggtcatttctacttcagagctattcgtgtcggagaagatacaaaattagcgaacattatcgcaacgatgaaaaaggcacagttatctaaagctcctattcaaaaatacgctgataagatggcgggcatatttgtcccgtttgtgatatcactatcagcaataacatttataacttggatgcttgtgagttacacgatgaagactcctcctctcatctttaacagtgaaaatggcaaattcttcatgtgcatgcaaatgtctatttctgtaattattgttgcatgtccttgtgcattgggtctagcggcacctacggcgattatggttggtactggtgtaggtgctagtcatggtgttctcatcaaaggtggtgatgttttggagaagtgtagtgctctacagacgtttttgttcgataagacaggtaccctcacgacggggcggatgagtgtagaaaatttcattaattataacagtgatgtatctgatttacactggaagatgatttcattgtgtgaatcaataggagaacatccagttgcaaaagctattgtcaattatgctgattcccacgtaaataaatcaagcattttcgatttggatttatcgaatgaggaagttctcattggaaagggaatttcctgtaacatcacagataaaaatacttctaaaatccatacaataaccataggtaacaagaaattatttcccgatgagagtttgagtgatatcgcttcttctactttaacagaatcttatgtttccatcgatggtagtttagtcggcaaatttgaaatatctgacagggtcaaagaagacgcacattttgttgtagaatatttacaaaatttgggcattaaatgctgcatggtcacaggagatgcgcatcaatctgctctgaaagtggcacaacaacttggcatatccgctaatgatgtcttcagtgaagtcactcctgagcagaaacgtgatattgtcattcaactccaaaacaacggtacagagagggttgcctttgtcggagatggtattaatgattctccggctttggttgaggcagatctaggaatttcgatatcttctggtactgatattgcaatcgaagctgccgatatcgttattcttgattcggataataaaaataattcgttaaaaggtttggtttatgcacttgatattgcgcgtaaaacattctatagagtgaagctgaatttcttttgggctgtctgttataacacattcatgattcccattgctatgggtttattagctccttggggtatcactttacatccaatgttgtctagtgctgcaatggctctaagttccgtgtccgtggtctgcagttcgctaatgttgaagaggtggacaccgccttcactcaatatcaaatcaatggaagcttccggtggattgtcatggcttagatttggtagaaacagtaacagaggtgatgatattgaacttcaggaaagattgatgtaaccttagctatttacgctattgcaattcttaaatatcagtacttgtattataacattaataaaattcatattcgtaataaacgaaagattgtataatagaatcgctggatgagtttattgtacagtgaaccaagcgctgtgtttagcaattactggtattattgttactcaaagcggtttgtcactacatcgttgatgagctgagttatttatccgggtaacaataaacaataagtaaaattaatcgatgagatgaacataactttagaagtacagatgaatgcatactgtaatctaataggcagttggtacaaatagcgagaagtaaggccaggtactcacaatgggtgttccgtccttttttcgttggttgtctaggaaatatcctaaaatcatttctcctgtgttggaagaatatccagttatcgaagatggtgttcaactaccgcttgattactcttcggccaatcccaatggtgagttggataacctttatctcgatatgaatggtattgttcacccttgttcacatccggagaataagccaccacctgaaacagaggatgaaatgcttcttgctgtgtttgagtacacaaatcgcgttttgaatatggccagaccaagaaaagtcttgatgatagcggttgatggtgttgcaccaagagcgaagatgaatcaacagagagcacgtaggtttcgtagtgcaagggatgcaaaactccaaaatgaagccagagagcaagtattacgagaaagagaggactatggtgagacgattgatgaaaatgtcaaaagtaaaaagacatgggattcaaacgcaattactccaggtaccccatttatggataaactagctacagctttaagatattggacaagtttcaagttagcaactgatcccgggtggaaaaatttacaaattattataagtgacgctactgttccaggtgaaggtgaacataaaataatgaatttcattagatctcaaagagcagacactcaatataatccaaatacaacacattgtatatatgggttagatgcagatttgatctttttgggactagcaacccacgaacctcatttcaaaatattaagagaggatgtgttcgccaataacaactataaaaaaccaaagcctcaagatatgataaatttatctgaagaagagaaacaacagcttattcaacaagattcagaaaagccattcttatggctccatatcagcgttttaagagaatatctttcagcagaattagcgattccacatttatcgttccagtttgattttgaacgagcaatcgacgattgggttttcatgtgtttcttctgtggtaatgatttcctaccgcatttaccttgtcttgatgtgagagagaatagcattgacattttggtggatatatggaagactgtgttgcccaaaacaaaaacctacctaacatgtgatggtacactcaatttggaacctgtagaagctttacttgaacaattaggagaccgtgaaacagatcttttcaaaaagaaatacattcaggaagttcgtaagcaagaggctcatgataggcgaaagaaattgaaaagtaaccccaatgtttcccagggcaaggtcgacagaaattttatgattccgttggagaatatgccggtctatgatgttgatggcaacgccgctgaaggctctttgaatttgtctaataaggatttcgctaatatgcgtaaagaaattaatttggcgaatgaaggtgatggcgaagcagctaaagctttgaaactaaaaagtgagaagaatagcggtgtggtcgagttttcatcggaagaattgaaaaatagcgtgcaactgtcgaagactgcgaactacgatgctgctaccagcttacaggagaaacttattgctaagaagatggcaatgagagatgaggaaaatgcagaagaattgtcgttgaaacggaaaagtgaagatgttgactctgctgaaaaggaaacatccaatgaacctgaggatgatgaggccgattatgatgaagacgaaggctctactgttccaccagcggtcatccacaccggtattgtaaaatcagggttcattgacaccgatgagtcggttagactttacgaacctggatatcatgatcgttactatcaacataaattccatgttccagcaaaagatattccagctctgcaaaaggatgtgattaggtgctatgtggaaggtatttcatgggttttattatattattatcagggatgtgcgtcttggacttggtactatccataccattatgctccttttgctcaggatttcaagaatataaaaaatctagatattcactttgatcttggtgaaccattcttaccatacgaacagttaatgagtgttttaccagcagcatcaggccacgcactacccgaaatattcagaccattaatgtcagatccaaactctgagattatagatttctatcctgaagaattcccagtggatatgaatggtaaaaagatggcttggcagggtattgcactattgccatttatagatgaaacacgtttactgaaaacagttcgagaacaatattctaagctttctgattcagaaaaggcaagaaatgttaggaagaaggatgcacttttgatcagcaacaagaatgtgaattacgacctgtttatgaagaatttatatggagaaaaccccgttaacgtgatagagtttagacatttcaaatctggtttaagtggattcgtaacacaagctgaagaagggtttgaactaaactccaagctgatatgtcctattaatgggggtggtttgccagatttgagtacaaatttattcctaaaactttcgtatacgcagcctgtggttgcgggtagatgtaaatcgttagtattgaacggatatatcccacctcaaccaatgcttaccccacaggaccgagactgtatcatttataaatacagtaaccgttggaatccttccatgatgaaatacaacattgtgcctgttggcccatcggggattacccaatatcagcccagggttggaggttacagaagtttcttcttccataaagaacagacagcttatgctcaacaaccgcaacaaaatagagagtatatgcactcgcaacagagacagccacagggcagcagatatcaacagtctaggtataataatggaaactacaataatagtaacaacggttattctgataataataatggtaataccggcaaatacaaccgtcattataacaacagtagaggtaatagcaatcgatactcgaatagtaacgatagaagaagggaattcagaagatgatgaactgtggacaattttatacccgtttatatcagcacatttatttgtaatacatactataacatcaacatccaaagcatattactgagcaacaggagtagaagcattcgcgacagtgatcagctccacagatactccttttccagtatcatgaacctggatacaaaatacacgtgatttgtagtttcactactgtgtctaatatttctccaactgtataacaattatccgatatagtgtaacggctatcacatcacgctttcaccgtggagaccggggttcgactccccgtatcggagtatttttttcagtttttcaagagaagtcttttttctttttttcactttttatcagcttgtgtacgggctcttctttgccaaacctttgatgatgaaaacctcagctaaagccattaaactcgtgaaatgattaataccaaaaatgttactttggcgttttcatagtagtggatgaacaaagctcatcgcaaaaatttaggagactccgtttagttggagtgttgaaggtcggctgttcgatcacctattcattgcattttttgaccctcactatctcactgtaatggatcttccaataccgaaaagtccccagaacaaacaggatgaagttcaagttccaagttcatctcccttgttacagacaaatgaagaatcttctccgttaaggcccgaaactggtacgcggatagatgaatcgccaatatcaagtaactctacttcttcccttttgagggacaagttcacgtatcaaccggctacgaaagcaagaaatggttactctcagaatgatttatcgcatgaacaagctttaaaagtgttggttcaagaatacaaggacctatcacccactttgattaatgcaattttcaagcaaaactctatgtctatctcctcgtcaagaaagcgtttggaccatattgtcgcctcacgtaccgggggatcgtggagattccaatctaaaacaaacgtgaacccgacacttaacttaaataaacccaactctcccatggatctgtcaaaatctagattaatctcattgaaagagggtggctcctccgggaacagcatcaaaagcaatcctgctattaatttgccctctagaaatgtatccacttccaagataaccatcgaaaagcaaaagacaagcattttcgaccgttactctcatgtaatgaaagtttcgcaaccctcccccgcaagatccatggcggatagaaccaccatgagtactatcaaaaatttatcttcaaagaagggtaaattggttagaggagacgccataaagaagaaacaaaaaatcaaactcagtgatgatgaagaagatgaaattactgatcaatccaacgatgacggagagctcgatactgaaccagaatatgaggagaaagttactgaaagtaattttgatcaagtgttgaagttcttgaatgaagcagatccgaaagatttagctgatcttggtgaaatatccatagaaaaagctgccctcgttataaaagaaaggccatttgaagacctggaacaatttcaacaattagatttccaatctaaatccccttctccggcaccaggcaaggctagaaaatcacaacagaaaaaagacggtttgaaaatacttgacaaaattgagcaatcgatcaagggatataatgctatcgagtcgttgatccgtaaatgttcaaaatatggtgatgtaatagcgaatcaaatgacgaattggggtgttgacttcagttcatccaaagatacggaattgaatatcttagacgttgatacttattcggatgatgaggctaatgaaactataactaacgattctgcaaatgttcaaataatcaaatcttcgaccacgtccagagaaaactcattaggtccatcgaaacgtaaaagaaatgacgatgaagaggagttttctgatgtggactacgaagaaagtgatgatgatgattttgatgtaaaaccaagagctaggacgaagcagaagaaaacatccataactcaacttcgcaataatcaaatgaaattcataaggcaaaaacctaagcttttatcttccgatgttgaattgaaggactatcagcaaacaggtatcaactggctgcacttgctttaccagaacgatttatcttgcatcctagctgatgaaatgggtctcggtaaaacttgtcaagtcatctcctttttagcgtatttgaaacaaacacaccataatggccctcatttggtagttgttccatcctctaccttggaaaactggcttcgtgaattcaataaattttgtccacacttgaaagttgaaccttactatggctctcaacaagaaagggcggaactacgtgatatcctagaagaaaacgaaggccagtatgatgttattgttactacatataatctagccgctggaaccaaatatgacgtttccttcctaagaaatcgtaattttgacgttgtggtgtatgatgaaggtcatatgttgaaaaactcgatgtcagaaagattcaacaaattgatgaaaattaatgcacatttccgtttgttacttacaggtaccccacttcaaaataacttgaaggaattaatgtctcttttggaatttatcatgccaaacctttttgtctctaaaaaggatgatcttgcaaccgttttcaagcagaaaacaagaacatctgacgctgataagggatataacccgcttttagccgagcatgctattgaaagagcaaaaacaatgatgaaaccattcattttaagaagaaagaaagatcaagtgttaaaacacttacctagaaagcataatcatatattacactgtgaaatgactgagctacaaaaaaccttgtaccaacaagaaatcaagcaggttatggagcacagaagaaagattaaagaaggtgttaaaatggaaaaagcatcacgcaatgtttcaaaaaaccttattatggcattgagaaaagcatctattcatccacttctcttcaggcatatttacaacgataaaattatttcaaagatgagcaaggctatcattgccgagcctgaatattatgaaaatggtaatattgagtatatcaaagaagatatgtcatatatgacagactttgaattgcacaaattatgttgcaaatttccctctctttacaagttcaaattacaatccgacgaatggatgaattcaggtaaagttgaacaacttaagtctgtattgcataaaatcattgacattcagcacgaaaaggttttagtgttttcactattcactcaagtcttggacattttagaatttgtattatccacacttaacatcaaattccttcgtttagacggtcaaacgcaggtgaatgaccgtcagtctctaattgacaggttctacgaagatgatactattccagtttttctactctcaaccaaggccggtggattcggaatcaatttggtttgtgcaaataatgtgattattttcgaccaaagttttaatccgcacgatgatagacaggccgcagatagagctcatcgtgtcggccaaactaaagaagtccaggttacaactttaatcagtagagataccattgaagagaaaattcttcatttggccaaaaacaaactagcattggatacacatattagtcaagaagacaagaaaaacgaggaggcccttgaaaataaggttacagatcttttagaagatattatttttgatgaaaatcagtaagtcaattaattggcagcttataaagttgttacacataatgttgatgtataattctagtgaaacaattttctttctgcaatacatagtctgtcgcgtcaattataaagagagaaagaaatattctttataataagttcaacctcagtgaagtgacacaaaatacagcaacatacatcgaaatgcatttcggtttcatatatcccatcaaagtaagtctggatacctgatcaattgaaatattcgtcacaatcacattactaacaaatgcgtgtttcattatttaggggttccttcaattgcccttttactggtcagatactttaaggaattatttctattatgtctggatattcctgttattagcatttatatatggattcgctgttataacagtattggttacctttgggctatttattttgataccaccattcgtgctaatcgccacatttcaagttaacacatggacattaatcattatgaggcatcttttattgaaagatcaaacctggttggcaagaaaaatagacgagacttacagaacagaagcattgagtgtgccacaattcatatcagatcgtgaagaggagaccttttcattttctaactttgttttaagttcattcaaattctttcttattctatctgtttcagttttcccgttagtaccacaactgcttatgatcccttccataggttggcaatatctgaacgcaatctacctaccaaatgagcttcccgacgatatataccggaagaataccttttcttatatagggttcggttttgttgctgcttttctcgaagcggttccttttgtgtctgggttagcatttacttctaactacctaggaggaacagtgatggcattagatatgaatcatgttgtcatcgaatgaagaattaaattgtgatataatgttgaagagcttaaagatactacattaatataacactacgctatcgacgcagccaaagcccgctgctacgccgccttcgttggaagagctaaatttagaccttaataaccatccagcatattcattagaataaatattattatgatcaaataaaatcgtaccaaatataccaagttcacttaagatgggaacgttgaataattcctgccctctgataacgaagttttcttctgtcgatttgggtgttatcagttccattaaaatgtatgcactccattcgtcctcgtcaactgattctaagaacccagggatatcttccttgtatatattgtttccaccaccttctctttgaggttttaacacatagttctcaggttcggtaagggctaacttcttgccgatttcacccaacacagatgaatccaatggatatattttgacaaatgttggtaaaagatgatctaaagattcagtatcggataaaaattctttcagaatcttgggatcagttagtaattgctgaatcttcttggtacctgaaagctgtgttagtaaattaggagccttaatagcataagagatttcaagagttagtctgttttcccaatcctgctctgaaacaaaatcacttggagcgtaacctgacctgaagtaaactaaaccaatttcttgtccagttgtcttgtgatataatcttttagtctcagggtctaatctagttgcttcatggatctcgtgaatggttaatctcacggatttagtatcgtattttgacaagaggttaagagctaaaatgctctgatcaaatacatttctttccccattttgaacaatgaaagccacaattggtcttttattcttgtcagccggttggtacttgttaatggcagttgctaagcctgtagcgagtaattcagctgaaggtgagataggtatatcctgatcataaaagacctcaccattatccgaatagttcccacttttgtttaggtaatcatgaagttctcctacttttgttgaaagaccgccaaacgacacagagacggtgttaaattccacttgcttgatctgattattatcgctgttgatgagataatccgagcggaaaacccccaatgctagatcttgcacgataccgtactctttagctctcttgtacaaagtccagagtctaccggtaaactctggatccgatttggctagcttttctgtttctttcgccaaccaatcattcttgttctgtgaaatacttgcgtacaatgcattgtaaatagtttggacatcaatggccttctgaaaagcttcgtttggcaatggagttgggaataatgtaattggtgctacagttgcaagttctggtttgaagttcggtgggtacattgctagtccattggtaagagcccaccgaaaaatctcggactgaaggccatcctgcaattttttggtagagatggcaggaaactttggataagactctgtagatgacatttgttggagtagctaaggttatacctggttcgattgagagagaataccgtttgataggatttcatctttcttcagattgtctcaagtaagttctaagatttgacatctaaagcccttttcctcttgattactaaagaaaaaacgttctcagtgatgtctgagatacagaatgagaagccataaaatggatcagtgaagtttatgaaagaaacatggaacgacggctagaaagcggtaatgtttagtattaattatatagtatgggacataatggtcagtaagtaaataattgaagaaagagtaaagactataaaaatacaactttgggaaaattacaggctttcccagtaattccaatcccaaatattcattcctgaatctgtagattcattaggagctggcatattaccagctgatgaaggaatggaaggctttgaattaattgagtacattccaagttccgatggcactaatggtttagtttcttgtacggaagatgggtcattcaaaaacatatcgtcaggtgaatcgaatttgacttttttggactcagacattaactcactcgaagaatcagtggggctgatttctaaatcatcgaatttccttttcttttcatcatgcttcggtgtagagttgagtattagttgtttaggatccgcgaatggtttgaaacaagcagtaatgtcagcgataggtattttgaacgaacgcaaggttttctcgctcttgcttggcatcaacaacttgttattccttaccgatatctcgactggatcttgatctcttgccttctgggccgcttttgagagttttttcttacctgtaccattaatctggtctaatattggctgtggagtcttatgaactaaatcgacagcatcatcctttatatccaaacagtccgcaaatgtagacaaaaacaagtcaattgaagacattacaaagacctccttacgatgtttataacgtgacatcagttctgctgtcctgatagccatcttcttcagagctagttcgtcattcttatatggattatcctgctgcggaggagaatttatcatagtcttcggcgaaggcgaattctgttgaccagaagctaagctcttgttattgaacattggggaggagccaggaattacagttggtgtggcagttcttgaattaacaacacttgcattgctgttggattgaggattagaagtcggaataccagattgtgaattcttcttaccctttacagcccttgtagcaggattctttttatccttgtttggagatggaactgctggtgaaatagcgctgaattcaggagagttcaaaaattccatagtattagttcctgatctactagtagcatttagtgaagagtcgaggacgatacccatgtttgaattattgttaacacctgaaattggttgctgtggttgctgttgctgagcagcaatctgaggtggttcttgtgtctgtgattgcattgctaagttcagttttctattctgtaacagctgttgttggtttagtaagtcatttgcagttagattagggttattattctgcatttgacgcattgtcatcaactgttgctgtcttcttaacaattgctccttagtatactcatagtacttttggtatctaaaaatgaccttatcgacaacatttggttcaaccaagaagactcctctgacagctttttccataatctccctagtaagcatcctaatctgtaataactgtctgatatgttcttcatttctagtcaacatgtataatgtaggtatgaagctctcaacactgctgaatagctgctgattggcatgaagttttgatctgatttgttgtttttgatcattagtcaacctgttggtgatatcattaagctttacgggatttttggtaacttctgcatttaacttcttgagagctagcatatcctgttctgttggtcttggaacagaaattttggattgctgctgttgttgttgttgctgttgtggtggtggtgatgattgctgttgcatcattggttgttggatattctgaggggtttgttgaggttgaggcttcatgacaccagcgtttggaataacaggggttggtttcattcccatagcttgtcgtctagactgagcttgttgggattgaggtggctgaacttgtggttgttgaagaggagcttgctgaacctgtggtatctgttgttgtctttgttgttgttgctgttgttgctgttgttgctgttgttgttgtaacagctgagactgctgttgagcagaaccaggcattgggattgggattcccaactgttgcattttcttcaacaccatttggttcatatattttttgatataaagaagctgctgttggctatcgagatttggaggcaactttccggacctttgcaaattttcaatcatcttcttaccagcttcataaagcattttctgttcagcttgggtgaagacctgattcaatcttcccaacaccgctggaggttcttgatgctgaggttgctgtttatgttgttgttgctgctgctgctgttgttgttgttgttgttgtcgtacctgttgttgctgttgaggcacttgattcatattcatcctttgattaggagattgttgcacacccattcccggttgctgaacagaagtattcattctgttaacatttgattgttgaagcttagatttgttcaacaattgctggtgcagttgataaactttcttggtgataatcaaatcattctgagaaggtctattcttctgtgcccaaaaggtaatctgaggccatgttgtgatcccgggaggtaagttgggtattttctggagtaattctctaggaatttccgtaacctttagctcattggcgagttgctgttgttgttgcaacgtcaattgtggcctcatcatgttaggctgctgctgttgtggttgtggctgttgtggcattggctgctgctgctgttgtccagtgagcgtgcttctaatttgcctttgagcctgctgtctagcctgtgcctgttgattcaaaaacatctgagcattgatattagccggaatgccattcgcctgctgttgaccggaaccttgctgttgcatatggtgctgttgttgctgttgttgctgttgtctctgcacagcttgtgcttgcgcctgagcttgagccagcttctgtctctgagcctcaatggacttcctcttagcagaatccatggcagcaatccgtttccgcatagcatccaagtacaaatccttagaattacaactggcatacaggctagactcaaactgttcggcactctttttcaatttctccaaattgaaattcgccttttcaccaccgttaattcgactcatatcggcaagaatctgcgccaattcagtaacgaactgacttcgttcctgagtcgagatagtgcttctccaatcgtccattatagaggtgattgcacttctgcctcctattgagtttcttttccgttcacaaccagtgtgagacccctttagttttcactcttgtctacctctctgtagtaaagaaatgtaaaacgatatctgttcttttatttcttagcgtttttttaattttggaatttattttttttttttttaaatttcccaaaatttcggtagaccactttatctttctctctccaatggttatattataaaactggaaaacacagccgagtgatgaaacgttttactctagacaataatccctggctacttcttatcaaagcagtatatcaacgacttttgttgtagatttgaccctttctgtctttctttctttctgtctttctttctttctgtcttgctcccccaaagactaaaactatttactttatttctcaaagtgtgtattgattttccgtcttatttttcttgattgtaaaactggaaactccaaatacagttataactccaggcagaactattgaaatgacgaaccaaaaacaaaaacaaaatttcacaatcctatctaaatcgtcccgacctgtgattaagcttcccttctaactctctgtatgtgatttattcgctcaattttgatccagttaaaagtaataaaaagcgtcttgttatattgttttgtataccccgttttttatccttcggcttccacacttcgtcgatcctagcctagctctgtatccccgagttctagttccctgcagttcttccaactcttgaccagcggctgaacagaagtgtatcccaagaatatacaaagagataccggcaaagtatcacgctgcacaaagggttagaagattaaaaaggctttcagtttagttttatttcaattttttttctcaagtttccttgaaattaatgctcacctgtttgtcctggtgtgtcagttccaaaccccagccactgctgcgacaatttctgcaagaaaagtggacatcggaagtgggcaggaaatttaaaaaaaaaaaaaaaaaaagagtgttaggaaatcgaatcaggaaatagatattgattgaatttggaaaggatttctttcgttgatccatagttccgattaagaaaactgtggaggcttaacttatatcataggtgtagatctatagctaaagttggagataggagaattatatatgtatctagttcaatagtgtaggcagatcttgtgcccactggcagatggctatggcatgagcagagtatgcaagtgctgatacgatgggccatgattccaactgtccagcgacaagtccgaatgcgatatattggcccatcatcttgtaaaatcttgtttctctttgtaagttatccactttcaggtatcttaggtatggtgcccaatatagtcttgttatgaagggtgaaattagggtatggaagatgaagggtcccaagataggaatcgatgagatcagtaataagccacatagaaccacgaatccagcgaagtattctgtcaatttccagggtaaatggttgaagaagaaatatgtagatgctaacgggtaataatacttgattggctggtcattacctgcatctatgatgttcacatccatgcttctgattgccatcccctggtacatggtgaacgagttcatctgtgacatacggatcgtcatcattgtcaacatatttgtatggaggaacatgtggatccatgcaacgatcaatccgatggggcccaagaaaacggaaagtggagtgtacaccggtagaattgtcagtagatatacaaaggtgactagcgcatacaatagtaaataaactaccattatgggaacgctggatttccaatactctggagtgctgagtaattcccagtatgagacaagcggataaaggtatattcctggtgtggaaagtccaggcacgagactcgctaccgcatctttgaaacgacgtttcaagattttgatcttggttttcgcaaaacgtactgtataatcctggaccccaagttcttctggcggttctaatagagtatgcctttggtctccgtatttgtatacaagacctccaaatgcgcaacagatcaacgtgccagcaaatgacatttttcttcttcgttattgtttttgctgggtcaaaagtatgctattactacaagaacttatagtttataacaagtggtcagttcagagaattacgatgtatacggacttatatagggtgatgtggttcttttaatcctgttaatttctggcctcttttgtgtcaaaataagtttgtatatgcaatataatcacgctgttgttcattatttaaatatcgcgggggccgcgtcagtgtcacaaaaaaaaaaagtgaaatgaaatattctgtagtacaaaatgaggggcaagagcgaagtggaagctagcatcggtttccgaaacagagaccaattccaactatgtagtgcacgtttccgtcccatatacaaaaaaacacgagtccctccttctttgaagctgcttttctacttcgcgtggcttgcgtcttctcagacggaaatccccgacagcgccatgccccatccctacgagaaggaaaaacttcccttttactaccctgactcgattagtgtttttgtttttccctcccgtatgttttcttcggagaatttttgaaactcgggaagaacaatccgcacaatgttactgcccaatccagtaatgaattccatactgctgttacccgcgcatgaaatgacgaattggcagattgactgggtttcactgcacgaagtgcaaatgatcacgtgctgagtttatttcttttccattctctgtcttggatttgaggcattgatatagcgtgagttggaaattggttttgatttaataggtattagctattgtagggtttatactactgacagttaggtttctggacccagtaccgtcccctattttttactcaacaattgaccattggtttaaatggctcagactttaattgaaaactataatatacatatctatagctcgtctgttcagtagaggaaacgagtggttcctacatgtgaaacggggatatctaggaaactggcatcccagaaataaatcaaacagtccaatttctatctcgtaaataatcctcaagaaaaccgggacgtctgacttcccgttgcaagccacaagttacgtttcttaatggactctttttcttcttcgatttttcattcagcccatctcactattgtactgctgtttctgccttatttttctttttacactatagagagtatatatgctttttctgatatttcatatcattttggatcttcaaccagaaacgttcgacggattttgataacttgaacccatttttaccagtcgctaccttctaactgttacttttatcaaatacagataatagtactcatttcataggtctgtaaaagcgttagaacaggtctatatattggttattcggttaccttttcatctttttttctgaccgtgtgtttcctcgtttcgttgtattttcactgatttaatttaccgagccaaaacttttctacttctaaaacgaatttcaacaacggagaaattaaatgtgaactcctgaacttcgaaatagaaaccgaactttgacgcttggaacaaaagattttaaatctggatagtatatctactgtaaggtaattgattcacaagtgcgctagctttatctacccatattttgtctgtttttttttgcacctttgttatgccgtttattggtgcttctaccgattcgcgtagtgggtttcatacactgatggaaaaacattcgagagcctcaacaccagtgtcttccacttcaagttttaaacgtgccgccactggcacttcaacggcagagttatcttctgcagatgatgatacacagagtttagcatcattttcgaggcttccgactaccagtgacattattgaacagccagaaccaattaaccaattgaggaaatcatcgacgatatcaactatatcttccatatcgtcatcgtctaacggttctattttcacagattctgatattagagaactcctgaggttcccaaattcttcaacacatgcatattcgtacaacccattatcaccttactcgttgtcggtacggctaacgatattgaaacggtccattgaaattatgatcaataatccttcacttttgagcgattctgatgagcctcatacttttgttaatatcgacgaagctaagaaactaattcctcagaaatctcaactacagacaccggtaccacccaaagtactgcgaaatgcttcatcagctgcattatcggcctttttcaccaacaagaatcaagacttgtctcctgtaaaaactttggttagtttgaactccaaaaattcagcatcgtcaaatcagctcgataaccaacaacaaaaaggccttccgacatctgttaatataatacgatcaagctcaaatcctttggcaacaacttgggagatcggcagtggacaaacaagcgaaaatactagtgcatcttcatccaggagaaattccctcgtttctaatcttcaatcatcgttaaatgatcatctaacgaacaaagcacctccttactatggcgacactgcaactgtcgattatgaagagaagaaaaaatctgatcttgaagcattgctagatttactcaataaagctttgcaaaataatacggatgatgctgcatcaagtcttcacgagatgtcactattcaacattaataaacttgccataccgtcaccacctaacaatggaaatggaagcggtaaatatgttgataatggagcaacaacaaaatatgacatcaattacgacgcacatgatactgcgattaagaaacaattattggagagtttggctcaaccgttccatgaaatttataacacaagggaagctttgatggacgaaaaagatcttgaatttaaagtggaagaatattcaagagatccgaattcgttaataaccggtaatagaattcttcacacattcacgtcccaaaagaattcgtccccaaaggcaatatttacttgttctcagcagcacccttggaagtttagagcagcaaatgaccttgcatgtttgatatttggtatatcaatgaatgcaatgcgtgctctaacattattagatttgattcatagtgatagcagaaactttgttctcaacaaaatcatgactacggaaggtcaagagcaggtatttacaggagaaattgttgggattaagcaaccgggacatgcttcctctggtctaatttggtcatcaatctgggctaaacgtaaaaatggtttaatcgtatgtgtattcgagaaagttccctgtgattacatggatgttctcctaaacttagaagactatagcatcgagaacgttgtgggtggagaaggtttgcagtatgatacaaagaatttctctatgaaagagcctcaggaagttgatggcacaggaaaaaagtcagtaaagttcgaacatcaacttcctgacgttgagtcgattagtaaatctctatggcaggttgtaaaggacgttacttcaggtaagttaatgggaccggacgatgatttactaccaatgccattgagagttgcaaatactataaacgatatcaggtactatacattgaattacttggaatataatattccatgtgcagtttcatgttctatattagataccgaattaaagcttaagatacacagcttgccttatcaaacgggtgtcttcattttgaacttgcacacatatgagatggtctcctttaacaaatcgatatctaaaaacatgtttggtcttcattacgcggaattggtggggaagagcattgaagaagttatcccatcattcccttcgatgattgcttatattaagcgaaactacccacagtgggatattgctttgcctacaaacaagggtttagtgttaacggagcactttttcaggaaaattgattgtgagatgcgaggaaaaggagaggaattctatcactctattggcttgaatgctctacacagagatggatctttcataaaggttgatgtacaattgcgcgttatcagttggaattacatggtgttatggataacttactcaagagatcttttcgggaaaaactattcttcaaatccatctcaattgaagattctcaacgaaaacaatatcaatgttgtcacaagtgccagttcggaaggttcttcaaaaaccaacagtgagaagatttcagtgactgatttcaagcaaatgcatgatgatttggaaaagatgaatctgagtctagaaggaagtactgtcggctcgcatctggagaaaaatccaatggaagaaaagaaggaggaaaacaaagaagttgaagaaacagaagaagttccggacgatgatctggaattgaaagcaaaactagaagttgctaaaaggtttcatcaggacaagtcacagtttgttaaagatgacaatttcaaattagacaaggaacttattgttaatatcacatcagcttctccacctgcacaagatgaccagtacaatatggattctacagcttctgacagttcaattcaaacatccaacacttcgaaatcctacgtgatcggatctcagaaacataccaaaaagttttctgacttccttgttttacagaagatgggagaaggcgcctacggtaaggttgatttatgcatgcacaaaaaggataagtacattgttgtcatcaaacgtatctacaaagaaagaattcttgttgatacctgggttagagatcgaacgttgggaactataccatcggagatccagattatggttacccttaatcggaaacctcatgaaaatatactgaggatcttggatttctttgaagacgatgattactattaccttgagacagaaatgcatggagaaacagggtcgattgatttgtttgatttaatagaacttaaaacgaatatgactgaatttgaagcgaaacttttgttcaagcaagtcgcttctggtatcaaacacctgcacgataatggaatagtccatagagatataaaagatgagaacgtaatcgtggacaacaaggggtttgttaagctaattgattttggatcagctgcttatgtcaaaagtggtccattcgacgttttcgtcggaaccattgattatgctgcaccggaagtattgggaggagagccatatgaaggtaaacctcaagatatatgggcaattggtgtattattgtataccataatttacaaagaaaatccattttacaatatagatgaaattttagacggtgacttgagaattcaatctacacacgaagttagtgccgaatgcgttgctttaataagaaaaatacttaaccggtccgtctcaaaaagaccgaccattgacgacatcatggaagattcgtggcttcaattataaactttgcatttttagttattatgtatgcttatatactttccaaaattcacttgaaaacatgcacttccagtattagtttggcataccttaacatttaccctatacctgtttcacttttcaacgatctgatacattataatgtttgtcaatatttttaacaaatctctttatattcgaagtttgaagtgcttaattttcgttttggttacgaatgtcattcactatttaagaatataaaaaatgtccagtttgcaaagtaatatacaactcatctgacggtgtaatcatcaacttcattattatgtgttgctgagctgtacctagaataactttttctcactacaagtaaccaatataatgcccctacacccataattgatattcctgtcactgggaatacccaatatgaataaccatcattttctacactgccattaggaggaacaaacggaatgacagctaggaaaaggttggatataatgaatataaccgtgactaggtaccaacttgaccatggcgtataaatatcgttccaaccaccatcatttgtccagtggatatatattaacccgattccaatgattaaattaaaccaaccgcttggatatgcataaagatcgatgattaactggtagatattgccgtttggtggcagaagtagtacgacaatggtaatgaagcagtgtaaaaacaaagcatagtttaacttactgaacagatgcgtcaaagggaatataccttcttttgcaagttcttgatttactctagcatttgagaaactaactgccatgacattaccatagttggagagaataatgcaaaacggtaagacacgggacactatctgcattgccaacgatttagagtacctttcaaaaattctttcgaagaagactccactgattaatatgcccgtatcagaaatttcagctttgggtatcacaacgtaatatgaaaagacaattgcgatgtataaaaatgtagttaaaccaacagatactggtgctgcaatcataagggtcctgcgcgggtcttctaattcttccaagacgtaattcgcgttctcccaacctttgaacgaataaatgacctgcaataaagcgactgaaatggaataccaatcgagaggttgggagccattgctgaaactgttgtgaaagttatcccaatgtggctcaataagatttggagcaattatagctattgatcccaaaaatacgatgactccaagtattagaacttttaccaaccctagatatagaatcactcttttcgctccggtaggaaaaaagatatgccataaggtacagcttattataaccaaagaaccgatatatctggatgctttatcaatgactgtttcagacaggcttgaattgaatcctaggacatatatgatgtatttaccaaaggcatacgagtttccagaactaaaacccaacaacacgattgtgaaagcataaatgcactcaattagatgtttgggtttcggtagagtcctgctcaaatagttcttttcacccccagacttgggtatttttaatccgaactctaaatatacgctcaagccggcgaacgtaaatatgcctccaagtacccacagaattaaagatataccaatcgattgctgtgagagtgtaaatattaaagctggtgtactgaaaatgccggttcctataattctgttaacaatcaatgaaatagtgtgaaaggtgttaagtttatgctcatggggattaataatgtaatcttcactaatgagaaataggtcttggatcggttcatctgtgcttgctatctctcgacgatcttcgttcggagatgacattgtagccccttattgccaagatgatatctaatactataaggggaacctctaaaaacatccaagacacgtaaggttacgtgtcaaaggcccattatcaggttcatcttaactcatttattgatcaaggttcataatgcagcttctataatcttcttccatttcatgaagtcaaacaatatcacgtgctaaaatcacatatgccaataattaaggaaggctatcccagagacaccataagataccagaatatattcaaattagtctgcaacaggtggtgacgaacctgcggcgttatgcaatcgtaactctattgaatttatgtcagttcatagtttttctattccaagggcataaccatcagcataaattattttgatagaaatagctttacctgaaccttcttgagccaagtaaaggcaagagtgaagataaggggttcacagataatgagaggttagtgtccaataaccggatagaatgatgagccagaaaagttttcaagtggtcgacacgacgaggttggaacagcttcttgatgatgatcggttcaggttgaatttacaacctgttgatatagagaaagagcatgcgcaagaatgcttagatctctatgtaaaaggtgaccttaaggaatgtctcgaactgatgtatgaatatgggctgttgaacagcaacaagatgcaaacgtccttaaaatcatggcaattaatgatggactgcgtgagtcaaatgaataatgttggggtaatcggaacgagtctagataagcgattgaaggaatggttcaccaatgaggaattacttctaagactaatcaagatgaagccgttgagtgatcaattgattatcacgtaccaattcttctattcttccttgaaattttggaagagaaacgttaaacaaaactatgaacacatcgatgaattatccatttcatgcaaggaactactcttacaaacttcaagaagatgccaaacagtaactgagattcaaaacctaagtcaaatactagatttcttgatatttgacgttcaaatagaaacgttacaaaagaaggccagcatcacgatgtacactcgattttgtcagctagacgacaaattgcagagcaagctcaaggcgaacaaggtgaagcacgctcaatccgtggatatagacacctatttccgcgaaaaactacaacctaaaccaaagccgaagccaaaatcaaagagtagatcgctgaagccaaaaaatcaagtccagatcggtgcagcaactacatcaacgtcgacaacagccgtaatagcacctgcatctacgcaaaggatgaatttgtcctatatacgacgcttgacaacctatctacctagatggttacctgtctgggctcaatcggtacaatggtcaccgcaattactggcatcgcttattatcttcgcaatatcaatggtactaccccttgcaagaagatcaaaaacgttcaatatcatatggatgcacagcaaagataaagcatccaccatagtaagacttttcatccatgcagtgaacactttagcatcgctatgagatgcctacgcacatattcatgtatctatatatttatccaaagttaccctacacaacgaacatcttcattaccctaccgagaccatcaatcacgtgactttgggttctctccccccttcttgtccccttcctccctcataacgtcagtggaaggaaggaaaacttgatgaaactgagatttggattgtttggtgagaaatcgatgaaagtcgaaatttgaaaataattaaaaatatacatttgggtttatcaagaacaaaacattagggttatactatctttgtatgttttcacaattggagaggacacaagagggcagagaaaaaggtttgggcttcgattttaccagaagatcaggaatttagacagtgtacttatatttagaggaacgagaacggtgtggtaagccaaatatctaacaaatttctttctcagtttcaagaataaatttaatttccgcaattattacccaactttagacaggctcggggaactttttagcagtgtaagaaataacatgggcgataatagcgacagtaaagtgaatctctatccattagctttgctaatggatgaattgaagcacgatgatatttctaatagggttgaagcaatgaaaaaactggacaccattgctttagccttgggcgttcaaaggacgcgtgatgaattgattccatttctaaccgaagtggctcaggatgatgaagatgaagtgtttgcagtcttggctgaacaattaggtaattttgtgccgtttgttggaggtagaaaatatgccactctgctattgcctgctttggagattcttgcatcaaccgaagagacgttggtgagagaaaaagcagttgattcattaaatatggtagccgaacagttgactgaggaacaattgctgcatgattttgtgcctttgattgaaaatcttgccaccaatgaatggttttcttccaaagtatcagcttgtgggttgttcaaagcagttttcgttagaattcaggatgataagtttagaaaagatttgttatcgttgttcttgcaattgatacaggatgatactccaatggttagaagagctgcgggcagaaacttacctacccttgttgaccaattgactgagcatccagaattgtcaacagatgacgaatgggactatatctctagtatgttccaaagattggtcaatgattctcaggattcggtgaaatttttggctgttgatgtcttgatctcaatcttgaaatttttcaataagaaaaaggacttcacacatacgaaggatctattacaatcttccattcaattaatcggggacgaagcatggagagttaggtacatggctgctgatagattcgaggaacttgcttctcagttcgtttcgaatccacaatatgtcagcgaattgttagaaccattcttagctttgtgtcaagataacgaaagtgatgtcaggaaagccatcgcaaaacaaattcctggctacgcaaaattgcttaatgacccatctgttatcttaaatagaattatacctgctgctcagaatctaagcatcgatgaaacagaatgtgtaagggcttctttggctttggagattacaaacttggcgcctttgctaccaaagcaagactcaatggatagtttagttccaatacttctacatatgttgaaagatgaattcccagatgtccgtttgaatatcattgccaaattgaaaatcgtcaatgaatctgtcggaatcgaatttctatctgagaatttgctacccgccattacagagcttgctaaggaccccaattggagagtaagattggccattattgaatatattcctcttctcgcagaacagttggggatggaattctttgattctaaactaagtgatttgtgtctatcgtggttgtgggacggtgtttactctatcagaagtgctgctatcacaaatctaagtaaactaactgaaatctttggttcagattgggcacaagaagaaatcatttctcgtttactaaagtcggacactcaactgttagaaaacttcaactatagaatcactctactatttgcattaactgggttggtccccgttgtctccacagacgttgttgtcgaaaagattctaccattcgtaaatcacttatccacagataacgttccaaacattagatttaacgttgcaaagttctacgctgtcatcgtagaagcgttaacgaaaaatactaataagaatcacattgaactaatcaataataccattattccaacactagaaaaactatgtcaagatcctgatgtcgacgtaaggtttttctctgcacagagtttagaaaaatgtaaatccttcttgtcctaagcgtagcagaatattatagggcaacatctatataaacatgaataattatcacatttatctacactttactatggcatgttttaagtggcggcatagtactagaattagtactagaattagtactggatttgttacgcgcgatatctaattatgtactcaataaatcagttatcctcggttttcacttcagtattcgattccgtagaggtagtttccgcacttctatccacatcatcaatctcattctgcgagagttcagctgctctctcttttctaaggtaatttatccattccgtgtaatcacccctgttgctgttcttcaccgtatcttcaagctccaaaccgactagtttcagtaattttttgtcaacccctgggcaaatatcgttcacaagacataattcacaccttttgctccttggcatgcagagtacctgtccaaagcccaccaatactggatttatttcataccacaaagatctcggtagccatgactctaactgttttctagtatgttcaggtgtcttacagactttaggatcaacccacttccacatctttgcaagcctatcaacatgaacatcaaccccaataccatcgatcttggcccacgatttttgtaaagctaaatatcccattttcggtcctactcccggtaatgacatgaagccttctattgtggtgggtacatcaccgtcaaattgatctcggagcatgacagcagcctttttaatgtaggaagctttccttgtgtggaacccaacgctgtaaatttctttgtctagaattttctcctcaatcttgagtaacgagcccaaggtgataccttccggatcacctaactcctccatacaatattccattatattatgcatagccttggcatttacctcatctttggtctgtgaagataacatcaaagaaactaaaagttgtaatctgtagttcttaggttgcatatttgactttgatattccaaatacaccgtttatggtaattggcagcattgcacatccaacattgtctactggagtctttatcatcgatctcataaaccttactttcgagtatatcgacacaaaattcgaaggcatattagggttgtcctcgatctgaagctttctattaagggagatgtcatcattagtgaatttttgcacatatttaaagtactcatctgtacccatagtttttattgcctcgatttcgggatccgttttaatgtcatggttaccttccaccttaactaccacttggtcttcaggttccttcttgaaatatttcgacacagtttctaattccacttcaacattaactcttggtctcttagcccttgtcattattgctcctctgcttagtcctgataataataggatcaacgtgagttgctttgttctttacccttatgtgccatgtctcattaatcatctcatcgcatctcgtttcttgaaatctaaaatcgggccagtataagaaccagaaaaattactgaaaagacgaatcagttatattttaaggaaaaggataccggacaagtaagaactttgtaaatcgtattacagcatgccaagggttttatcagtttcaaattgaaagtcatcatatttttaagtattataatctggacattgggataccttggagaatctgcaatgtttggacggaaacttttaccagtattgaagaagcttcctggtaagacaaaaattaagaccccttcgtcatcaatccaaggaccattcaatgacagatttactatgttgacatacaatatgctatccccgtattacatgtggccacaggtgtatacatatgtgaaggatgaatataaggattgggattatcgacataggctgctggaacatgagctattttacaagtacaagtcagatattatttgtttgcaggaattgactacaaacgattacaatgagttttggaagaaacaaatgatgaatagaatgaactacgggtccaacttcaccgcaaagacacctcccaaatattggacgaagcctttggaatgtatggatggggtaggaattttttacaatttggataagttcgagtacctgttttccagcagtttatatctcaatgatcttgttggaacgtttgatcaacaggagttacactacttaacccatcataatattacactcacaaatggtgcgggtgatgttattggcgaagatagtttatataatgtggctaaggcaagaaaccaagtgtgtcttttcgtaatgttacggcatagggaaagtaaatcgataatcgtggtaattaatacacacttatattggaaatacgatgaagtcaaattagtacaatgtttgatcattatgcggaaacttcaacggataattaaaggtcttttaatggggattgaaggagttacttactcgaatgtcaagattttgtttagcggagatttcaattcgtcacgagattctcttgtcatcaagtttttaaacggaaaaataatcaagcatggagacattaacctgcaaaatccaatgagagcttatttgagccattccatctacgacgatatccctgaagacgcttacgtccacacatgttattcaggcaaacttaagggcattttcgactatatatggttccatccaggagattttgaagtggaaaaagtactcagcggccaagaagtatcaaaagaactaacccatctaaatgatttcggtctccctaataaatatcatccgagtgatcatattcctgttttaacggaactaagaatactatgatttttttgtcactaaaacacagataggatccttgaaactgaaagagtcaataaaaagcggtgatgatcaccaaataaggaaaaaattacaactagatcactgatccttaatccttatcatgcggtgacacattatcctttctctttcaaatgcatgctttccttcttgttcttcctcatccctcacgcagtagatatgcctttttttcgcggttaaaaaaagttttacagaatgaaaaattaatgaaaatgtaatcaagatgaggttttaatgtctgtgcaacaagtttggagaggagtgactaaacacctaagctgtagcctgttgattcgagttatcaagttaatataatacctaaaaggtttttggatactttcagtttattttgcatatagcgatcctaaagaaactgattactaggtgttctacgtaagggaaacaatgaatcatattttgttacaaaccttgaacaaggatgtttcgacaccacagatacagcagcaacaactcaagcctctgcaacaacaggcaggcactagtaaccgggtaggatctggtgtggctttcctcatgggtgacccagtggtcagagatgctaggatgaggctagacatcaagaagtcattttgtgatgaccatatgttctaccctgaaagcaagtttggctggtcaacagtggcaagcaacaccaatgcgagcgcatacattcctgtaggggtgcgttcttatggtttatcaacatacaatcaaagagtttctcagcatacgaacttgggcggcggtgtagatattagtgacacaaattcgaacggattggcaggaccggttcctcacaacacccgtcatgtgtatacggggcagaacttcaatagcatggaacagcacaagcaacaacagcaagttaacccttatctgctgtccaataacgtccagcagtcctttaacatcaacgataaccaacaaagctattacggtagaagtatgaaaaatggcagtagcaatagcagcaacaattataataccaatagtcttggaggatcgcataccatcaataacaaatggtaatattccggtttattttccttttattcagaataatattattagcattcagattctctacgttgttcgtttcttattaatcactataaagttttccacttagttgctcgaaatgatattaattgttgtggaaaagggttttcattgtttctggttatttgagcttcagttctaagaatagtatttaatagcatgtatcctattcattctaaaacaccattttaatttaatatttgttctccaataccattccgtatatcaaattataactaaaaggaatagtattatagaaagaatcacaattaggaagcaagggcctttctcacgagctgttgcttcgtaagcattaagtcttctcccagccctttgtaaatgactttcacttcgatctacttggcgctcaatatccgttaagagatgttcattttgctgttctacctcatcgttaatctcgatagatattccttgtgtcctattaatagaacttgacaggttttctagatggctctcttgttccatcaattgctgctgttgttgaatgaaaatatcctgatttgaaacttgtggagaaatattgtattttggagttcctgtctcttgatttccaaataattcctttctcttgacctccaataaatcatctacaactgtagatgaagactcatcatctttatatggtttaaacttctgttcgggttctttatgctcttcaactaatccgtctttaaaccgtaccttctttgtttctctcagattaggctttcttttgaatctatagagttccttgtcaatgactgtttctggcaagccttcaatgatatcattataagttttaatctgatgattaaatctatcatcttcagaaaagggtacatcatcttcataatctttgagcaaatcaagtgtatggtttatatgtttcttaagttttatgttatcatttttagatggttgcatgtgaaggacatccattaacctgtctctctcatccacaatctctattaatttatcgatttcatattcgaccttcaaaccattcatttttttatatctatcgtccctctttctctgtagataatacgcctaacattaagcttcgcataggtgttggctgcgttaggttacgaaatgccacttatttttaacacgagctgtctcttatgccaacgaatcacatttaaggttctccggtatatagcataaaatatcgaatagtcaaagaattaataggacaaaagagattacccggaacaataattgacagtaattccccagttgaagcaccaagaccaattgcaagccaaatcggagatacaacaagtgtctgtcttattgaaaagttggattatttatccatatgtacactatactataattgttaaggttgtgctccattattgagcattttgtttcttaaaagctatcgaacgcttagtaactcttcctgtctttgatctgttctttgttctttttagtacaggggtggtttctccctttgaagctcttaaaccctcaattgtcaactcttcacctagcttagccctatcagccttacctaacaccttcttagctcttcccagttttgtcctttgttggtcgtttaatttattattttgtagggaagattggtttccttgggcctttctcatattcttgcatctagaaattcttagctttctggccttcttaccttcatggatcttcttttcatgtagtagtaacgctttactcactgattggaagtccttaaattgaacgtatgcgaaacctttacccatgttcgtctttgaatcacgaataatacgaacatattcaatgtcaccacaaggttcaaagtgcttccagagactttcttccacttcttcaaaatccaaattacccacgaagactgatcttctcttatcatgtggggaggggtgtgtaaccgaatccactctcaaatgatggtcgttgaacactttaccgttcagatattggcacataatcttgaccggattggagctcccatatacggcatatgcgttgatcgaatctctagatttgtgaagcttttgatgaacaaatgcaacttttcttggcaatgcttcttcgaatgcaatggatctgaatctgatactttccacattaaacttaacatcttttgtcttactttcttcttcttcttcgtcttcttctccgtcatcgtggtcatcattctcgctacggggatccttggagagaagtttcttaaattctttgtaaactttctttgatgtgataacctcatttggtacattcccaataaaaattgttctctcagccttggctagttccttttctttcaaattgataactttagcagattcagattccgtgccggtaatcgaagacttatcgactgcagttgcttcatcttcattatcactatcggaagagtcgtccttaggttcatccttaggttcatctttagatttagaatcacctaataccttagaataatattgaacttccaaattatcattctcttcatcattcttcttggtcttcttctttttcttcttcggctgttcttcctgttcttcctgttctttctctactccttcggagacagtagaagcactttcctggacattctcttcttcttgttcatccttatcctgttcaggctcagttagcacagtcctagctttcgactttactttacgctcatcgacatgattaggtttggagaataacgctgcaatcgatgatgtacctgccgcgtctgatttggaatttccaaataaattgttcaatgcggacatcccgtaatataattttggtttgttatgtttgaaagaccctggttcaccaacacaaacgttattcctctgcactaaacctgctggtggctgtccaagtctcttcgatgcgatgagctttatccatttgtctgttgaattatcgaaagtgaaaaacctgcacttcctagaaaagccagcagaaatcatgaatttaccaccaaaaagaaatgcggaagaaaagcgtacgctctatggacaaatcgaatgtatcgtagtcacgtgattaacaccgtggaatgtactatatggccgggtaacatcatgttccttttccttaaaaaacgtacaaactgtaaatagtgctgaaatgccgaaatataagttaagaataaaaatacagtctgattttagcatgaacatatagttatggccagtcagcaatcaatacatagatctcatccaaacgtgatttaaaatattgtgtactactaagaatagagagagataactgttttgctagtaaaaataagaattacgcgaagtaaggtatatttgcagccctttgttttagtgtgtcaggtatcaactttcaatctattcaagcagcaattcttaacttatactgcgcatattaaacggtttgctggttaaattttgtgtgtttctgcattggagtataagctaagtgttttttctttgccatcagccgattggagtaatacaaaggttgtattggttatatgcgttgggatttctttctttttgaattcaaacggtactatctttgaatcattcaaatggagccagagagaaacaaaaataacagtgtagaggctgcgagtgagattgacgatcataataccagatctgcccccactacgaaacttaccaaagaagttttagagaagattgcttcggattctgattctgttaattttaacgcaaatagttattcaaggaaatcgaaatcagggagtccctcaaaggttggtacattagaatacgacgataacagtaccagtggattatctaaggtcacttctccagaacatccaaactcagtctctctatcggacatatacatctcatcagacgctgagaccgaaaagatggatttagaagaggacgaatcacgtgtcaaactatcggaaatggcatccaattcgattgaaagtaacggtaatgacaaaagtaaacaaaatgatgataatctttcgaagactgtaaaacaagagtacatcaataatggtgtcggtagttatattcaagaatctgcccctaaacttgctactccttcaaaagatgagggaccaatcgttcagcaagataaaccagccgaaacagaacctgaaccagtaccgtatgaagatgacgctgttgctgatacagatcatacaacagagccaaataaacttgcactaagccaaaaccaggacgaagtatctgtacctgccgaaggaggcagtcaagaagaaacaattgcaaacgatgaacaagaacagcatgctccggtagtagaggagcaggcgaatgataacgagatcaaatcgcaagaagaatcagaagtgtctttaaagcataaccgtgaagaagagcaacagtccctagagaacggctcggagcatgtcaagtctgaacaggtgttcaagaaaccgaaattacctactgagtcaaaatcaggtcactatgaagacgagcatgaaacgcatgaaaacggagatcatgatgttgatatcgacgcggatgcagaagctgaggatgatggtactctagaaagtgaggttgaggacaataatgaggatgaagaggaagaattagaacccgaaatggacgcagtagaagaagataatgatgagaaacaacagacagatacacctggcgtcgattctaccgataatggactatcgcccatggagaaggaaaggataagacaagacgctttggcagaactaacaaatattgaagtcgaatttgctcaattgcgacagagtctatatgaaaacaagctgagcaaattacagaatgagctacagatgtgtctagatggatcacatcctcaactacagacttattatcagaagattgcttcgatacgggactttaagctaaagagaatgtaccaaaggcaaaagtatgagctggagtgcatagataccgaaactagggcgacaagaacgtttattcatcaagatttctacagaaaggtctcagatttgaaacataagttattaggaaacacaacccagaagtggtatgacatcaataaagagagacgtgaaatggacgttgttgtacctgaagtaaattatcacgttccaataaaaatttcaaataaatctttgagttgtataaccggatacgcagctcctgccaatctgagacgtccaggcgacttgttatcagaagatttattatgtgaaaatatcaatttcagatatcataacaaccctgtcgataagttagaagtcattgtagacagaatgaggtttaataatgaattgagcgacttagatggtataaggaaattctatggaggattcccaggtgctcctgaacttggtggtttaaaagattctgaaattcatgaggatcttgcaggaatacagcatcaacaataggtcatataatttttcactaggtgctccaaaaaccagaaaacacgctcttatcaatagtcaataaaatgtcatcttgatgaatcatcatttaattatcgttttgttatgatgtgtaatctttacaagtataatatatgcatgactgtgtatatgtatagcacttttaacatttccacgatatgaaagtgtattcgaattgacatctgtgaattcgagaaaccttgatattttaaaatatacaaagatgtatgttatatatggaatagaagatatacttcctactaattaaacatttgttggacgttggtagagataaaagcgtaaataataaaaagatgagaaagaaaccccaaaaatagtagtccttgtgaagtgaggaaaggttgtgatgaattggtcagattccaatgtgaagcgaaatatctttattttattaagacaccaggatagaaataaaacttataataaaccgtatccaacccgatgatatttttctataagaaacaaagggatcgatatcatgatttgatgtccaaattaaaagggcatttgaggatgacaactggatcaatttttaagttttctggaataattctgcgtatatcattgatataatcgcagatttaaaattcggtaccacatgataatacgagggaatctggatactatatcaatgcccaaaacttcttaagtgtccgaacttcaaaaaaaaaacagagaagcgtattttgtcaaggggaaattttttcttggagttcttgcaatagttcttatcaataaagtagtttatctcaatgggatgaaacgagaggtggtggcaccagctctaccatgtctaactggagtgtaggtgatagagaattcacccaagtagtgaccgaccatttcaggtctgatttcgacttggttgaagaccttaccgttgtaaacaccaacaacagaaccaatcatttctggaacgatgatcatgtttctcaagtgagttctgacaacagctggcttttcattttctggagcagacaatttagcagctctcaacttcttcatcaaaccagctggcttttcagacaaaccacgagcgaactttcttctaactctggctggggccaacttaacgaagtcttcagttggcatttccaacaacttttctaggtcaacacccttgtaagagtaggtcttgaaggatctctttcttggagcagcggcttcagacatgttggcttgctttcttattgtatggttcggtgagttaagctaaacaacaaaaaggaaaaggaaaattaaaccaagctctattgaaaccttctattataaaaagaatacgtgaaatgaattgcaatatcaactaaaatctctatgtgaaatcaacaaaagctgtaactatcaaaaaaagcattaaattcaaactgagattgttcgtattggtgaaaaaggtcgatatcctcaaacttcgcaatgattctgaaaagttcaccaaaaaaatcattcaatggtaggacccatactagggaaccaagctgttcgcagagacaatagcggaggagaagatgggccctattcccagctggaagcatgggttggacgggggagacggtaaggttaggcaggaagctttgctaccggtaggcaggccagtaagcttgcactccgtgtacccaacagggtggagaacagggagggagtggaaccggagcgtaggaggaaattggcgagtctgcctacagattgtaagttcggtgcgaaaaaattagtaagtggtgagactcaaaatgaaaataagggactgttaccacaatacaccacatataaaaatgcgtttaaatcctattactatatgtacaccgcactttgttgttttcttaccatccatatcttttaagtttttcgtccgaaaaaggaaaacatctaggcgaccaattccactgattttctttagcactggaaaatcgaggaatctggttcccaatctgcaattcgatggaatcagtgcgagagttagtactctcacagtggaaagcttcaacgctttccaatggcgcccggtaattctctctaccttgacgaatcttcaacatttttgtcaattgattagaggtttacaatacacgtttaaggtttaagtgcctttatattttaattgttaaaggcataatactgtttaattcttggtatagttcacgtaattctccccagaaacctcgacaaatattgaacgcttaaagatgaagtacttggccgcttacttgttattaaacgccgctggcaacaccccatcctctgacaatgtcaaggctgttttagaatccgttggaatcgaagttgaagaagaaaaggtttcttctttgttgtccgctttggaaggtaagtctgttgaagaacttatcgctgaaggtaccgaaaagttggcctctgtcccagcttcttctggtgctgctgcctctggtgctgctgcttccggtgcttccgaagctgctgctgaagaagctccagaatccgaaaaggaagaatctgatgacgacatgggtttcggtctattcgattaaacaaatcaattttaaagggacttacacaataatgaacaagaacttttgatatcctgaaatttttgcaaggctaaaccagcaataactttcacataatggatgttatggttgttctaatttttctatctattcttttattattctacgtttaacgtttcaaacctcatacaaaccgttcctcacacacgctcagcatttgcattcaacgggaacagaataaatcaaaaggtgggaattctttgcatttttttgtaaggatacctatgtactatccattgcccattatcaatgcttactattcatgtacaactacatcaaaccagtatacaggatctatatctgataataataaaaacattactactcagtgattttactcaaaatataatcggcgctgtcctactgtctgtaatggctgacaatatacaattgagttgtaaatataacaatcacgtgacatcaatcacgtgatgtttatttatttattttttctagttattccgcctcttgccgagatgacaaatttctattcaactgtggctctactatgtcttctggagctcatttcttttccatgaaaatatgtggcgctttgttgatgatatcgcatgttcacgtgcaattgtacagacacacaggcagctctagtgacagacagggaggcaacttacagaaatggatccaaaggccaagggaattcgattccaattgcggatttggtaaggctgctttggctgcttcgttttgggtctcgaatgacaaacgaatttttcccactgagttctctcatttctttcctgcatttgagctcgcatctgcaagaactggaacttctggaggcacagttgatttataatgctcgagggttcttcttactcatttgatatatataagaaaacttaattctaattaaacgttacctattaattatactgattctgtctatttaaaccctttcttagttttaatcatagctaatcatcgcaggtagaattttagttgtatctggttctaagttccacaagaaagtgaaaataagatatatttgaaatgggtttgttaccaactgataagtttgctacaaaggctattcacgccggtactcacgtggatgttcacggttctgtcattgaaccaatttctttgtctactactttcaagcagtctgctccagctcaaccaattggtgaatacgaatactctagatctcaaaatccaaatagaaagaatttggaagatgccattgctgctttggaaaatggtaaatacggtttagcgttctctagtggttccgccaccactgctgtgattctacaatccttgccacaaggttctcatgcagtttctattggtgatgtttacggtggtactcacagatacttcaccaaagttgccaatgctcatggtgttgaaaccactttcaccaacaacttggtagctgagttgccatctttgatcaaggaaaacactaaattggtttggattgaaaccccaactaacccaactttaaaagttactgatatcgaattagtagccaagaccgctaagtccattaataaggatatcctactggttgttgacaacactttcctatctccatatttgtctaaccctctgaacttcggtgctgacatcgtcgtccactctgctactaaatacattaacggtcactctgacgtcgtcttgggtgtcttagctaccaacgacaaagtcatctacgaaaagttgcaatttttgcaaaacgctattggtgccattccatcaccatttgattcttggttggtacaccgtggtgtcaagactttgcacttgagagttagacaagcttctttgtccgctcacaagattgctgaattcttatcctctaacgaaaatgtcatcgcagttaattacccaggtttaccaactcacgaaagttatgcagtcgttaagaaacaacaccgcgatgctctaggtggtggtatgatctccttcagaatcaaaggtggtgcagaagctgcttctaccttctcatcttctaccagattattcactctggctgaatctcttggtggtatcgaatccctattggaagttcctgccgtcatgacccacggtggtatcccaaaggagcaaagagaagcatccggtgtttacgacgatttggtcagattatccattggtattgaggatacagatgatctattggaagatattaagcaagctcttgcatccgcatccaactaatattaattttcgataaaacaccagaaacacccttccacatcaatgaagaaaacgagagcacgttaattaattcatatgcgacagcattttcaatggcagggttttcaacccccatctatttgctttaataggtccacttctgttattgtacggattagtatatagaatttttttttatctatctggctatactagctcacgtctttgatagactctttatctataataacccagaatcactgttttgatagaacattcacttctcactgacggcaggtagtagccttcaaaatccaaaccaatctgtcacttctttctttccaaccttgaagtttagatgtgctgtcatattctgttcatgccgtgaaagatctaaaaataataaatgacaaaccgtgtcttgccatttcacgcacacataacagctatagtatcgttagagtggattatcctctaccggattcataggttcacacaaaaccacactatctagatagaccatcaggtttcgatatgagagtcaaatgtgtaaacagagccatatatgtgctgacggtgctacttttttctaggctggttgtttctcaagttgtcctaacaccatctaattcaaatgctgatccgaaacaaaaagatacagcaaatacagttgctgcagtggaagctaataatgacgctaacatagctaagaaagacgctgaatcagatctagttattggagatcatttggtctgcaatacaaaagaatgttatcccataggatttgtaccctctacagaatggaaagaaatcagacctggtcaacgactacctccaggacttgatattagagtaagcctagagaaaggtgttagggaagctaaattacctgaaccaggatccgagaacattggtaatgaggaggaagatgtgaagggtttggtacttggtgcagaaggttcgaccttatctgaatctgaattgaaagaaacctcagaggatttggaaaatgagcagagtggattcaaattgaacaatgctgaaaaagagagcgatattctacagcaagaaactgatcttaagatagcggtgtcggataacgctgaagcaacctctaatgaacctgcggggcacgaattttctgaagattttgccaaaataaaatccttaatgcagtcaccagatgagaagacgtgggaagaagttgagactcttcttgatgacttagttgagtttgcacatgattataaaaaaggtttcaagattttgtcaaatgagttcgaattattagaatatctttctttcaacgatactctttctattcaaattagagagctggctgctaggataatcgtcagttcgttaaggaataatccaccaagtattgatttcgtgaatgaaaaatatccacagaccacctttaaattgtgcgagcatctttctgaacttcaagcttctcagggctcaaaattacttatcaagaggtttttatctatacttgacgtgttgctgagccgcacagaatatgtgtccataaaagatgacgttttatggcgcttataccaaattgaagacccatcttctaagatcaagatattagaaatcattgccaaattttataatgagaaaaacgaacaagtcattgacactgtgcaacaagacatgaagacagtgcaaaaatgggtgaatgaattaacaacaataatacaaacaccagaactagatgaacttcatctcagatccttcttccattgcatcagtttcataaagacacgtttcaaaaaccgtgtcaaaatagattctgatttcttgaattggttaatcgatgagattgaagtgcgcaatgaaaaatcgaaagatgatatttataaaagagatgtggatcaactggaatttgataatcagttagccaaaagcagacatgcagttttcggtaacccaaatgctgccagactaaaagagagactctttgacgatgatgacactttaatagccgatgagctatgagtgattgacagcgaaatacataaattggcattacgttattagatagaatttaaattggaaaagtctatgtaatttatttaaataacggtagtctcagtcctttgtaacctcatccaagaaagttgcatcgttttgcaaccttactctgaacttttcccaccatgtatcaaaccttttgatggagacgttcccttgagcatcgacaaatccagttaaataattataagcatgctgaacgatcttcgcagccaattcttgtgttaccacaggatattgtttcgcaagagctcctgcagttaggatttgtacagaattcttagatagtaccattgcaccggcaccagcgctcgaactcaatgcagcttgctccgctttccactgctcaagcttggcagtggcatcatttcttggttcaatggaaattcctatgattaactgcgaaatattgtgatttgcgttggcaccattgaggtcatctgtcattacatcgtcttccatatcaatttcacctaatccatctgaagggttagctgtcacaccattcccaacattggcctgtggaagttttaccttaaaaattgcactcggtttctcattacccaagtatccaaataatttgaagtcctccgctggatttagtttaaaatacactgtcgcaaggaattcctgagggaatgttacgtttggtagtataaacaaagtgatatgtgagtatgattttggctttgttgatgataatactattgtatgctgcaaaccattagaattaggtacttcagtggataattgtaaggggttcccggaggcgatggcagcaaacattttacaattcctgtttgctgtactttgtcagagtgtgagtagataggagtaccattttcttggaacagaaagccgtcctacaaaggttgtgtgtgttttcccaacttcttttatgtatgtatcctttatattacttgaactttatatcattttcttgcttattcgagaaatttcctaaccttcacgcacatgaaccccgagagatagaaaattgctatatacatgaatagtaactatttaatatgtagtatttatattaacgcgatttgatcagcgttaatgcgttaccaattcttctgttagattcatctggtgtaagaatcttcaccaagacgggaagtttaacgcaaggcattgagccgacaagagcaaatctaacactttcgaaaataagtttctttggtacggataattcttccactgcagttttgatgaggtctgagatgttagattctgagattttatctttcaggaatgatagtaccctgcaaacatcatctgtgttatgattctccaagaaattggtagcattctcattgacataagtaggatctttgaataaattgtaaaaagatgaatcaatatcgtaaatcgttgtcaaatgggttccaatagactttaaaacctctcttaaatgatctttgctcaatgacttgtaattgggtttcataaaatcgtatgcgatgtctaaaagctcttcgaattggtccggattttgtagcctctgtgttagatagtgcttattaaagtagtataattttttgtcatccactttggcatttcccttcgtcaagtgatttaaatcaaaaatatgcactaattcctcgagactaaagcattcgtggttagctgaagccaattctcttggaggtgcccacccaaaaagtgcgctaaaattgatcaaagcttcaggtaaaatgcccttcgcacgcatcgcccggacatcagcatcacctttacgtttacttaattttttatcactggtagttgtcaacaatgggatatgtacatagtgtggtggtgtccaaccatacgcttcgtatagggcagtgtgttttggtgtggacggaagccactcttcacctctaataacatgtgtaattttcatcaaatgatcgtctataacatttgcaaagtgataagttggcaagttgtccgatttcatgaggattggatcatcgtatctgatatccaaaggatttacttgtggttgtatgtccaatttgccatgaagaagatcctcgaatggtggatatttgtctggagatttaaatctcacagtaaaaggaatacctgcctttaaatttgcttctacttcttgatcggatagttttgaacagtgacgatcgtaactcactgtagttggtggttgtaatttctgtgcagactctcttaatgcatcaagacgctcttttgaacaaaaacatttgtaagcatctcctttttccacaagagtattaatatattcctgatatattttggttctatcactttgtctgtagggaccatatatttcattaacgccaggaccttcatcatatttgatattacaccattttaaagcatcgtataaactttgttctgcaccaggtacaagtcttttctgatcagtatcctctaatcgcaataggaattcaccacctgtattcttagctagtagataattataaagcgcggttcttaatgaacccatgtgaagaaacccagttggagaaggagcaaacctggtccttaccgggtacttaggatgcacatctttgacaggttttttaacaaaaagagatttcttggatttattcagtataccttcaagttttccttttgacaaagacgaatattttctagtgcatttttcaatgctgcccaacactgaagctctgaacatcgctcgaggatttgcagctattgtcaaagtccactaatgttgtactctcacagcgttagttgagattacttcttttcttgatatgtgaaaaatatataaatcaaggcagtttagacggatgtcagaatcatggttgataattaaacagagacaaagaaagagagtgtgtatcaatgaatggtaattttcgtttactatatatctataatgtagaacgatgttgtttataaaatatatgacgtagtttctccgaaatgagttctttgtggatcggttgcagggtctggtatccaagatcccgcgaagacgcaatgaattctcatcctctcatgataaaagagattcgtcaaaagctttggtgtaataaggaagtattgggaagtattctcagcacaggcattttctaccataattctgtgaacgattctttcgttggtttgatccataccttgattaatctcgtcgactactctgaatggagacgaggtaaactgctgtaatgcaatcatgtaaagaactgtagacacagccctttctccacccgattgtacatgaggattaagctgttgtagttcactgttatcccgaaacttgacttttatttcaatgcaccaatcgttgaaagagtcaggtttcttcaactccacttgaccggcgctcccaacatatgcgaaaagatgggagaatttcttagagatctgtttcacaatatcatccaacctaggctctagggagtttcttatttcaagtattgtttgagcattagatgcgagcttggctcgtagatgaggaagagttttctccagtatagatatatcttcgttggttttttttagaatgtcaatgacagaagtgtcgttgttgatcatagagagttcacttgaaagcctatttataatactttcgatatgaatcgagctgaattgattttcttgattatattttaccgcaatttcgttgagaacatccttttcctcttctgggaagttctcgattgcattcgagcactttataaactcatctgtgtttttgatacttttgtattgctcagaaacatcgatgaactcttcttttttcaaattgcgcgcttcttccatagacctgcacacctgtgatatggaatcaattttcgtacgtaattccaggagatacatattctttgtcgccatctcgatatcaaattcttgcatctgtatggttatggggtgtaaacgaagtaaagctttcctctcgctctcgcgtgcctcttgtaacttgttactggcttcttttatgctgtctcttatatctactcttagcttttcattgttgtcgttgactttctggcgatatctactgatcttgacatcatattgctgcaagagtcgagaacttttcccaagctcatagcgctgagttttcaaatgatctgttacgtggcgtgattctactatctctttttctttcttagctatgtcagtggacaaactttttagattttcatcaagcttgactacctcctcatgcaatttcttaattgataaattgatggcatcaatatcggaacgccccattgaagatgctttgtagaaatcagcatgcattttgatacgaacagatttagaataaatttgctttctaccgtactcagactgatttatattatggatgtaagagccttctatgaattttgggaaaagaatccttccgtttctgtcaacttttttcaatgcttctaaatgacttttgccaagaggtcgtctggtaacgggtatcatgtggattttttgttgctgacagagcatttttatgacattttcatctcctttgatgaaatcgactaaatatccttcgaatccaaatcctcgtagttcttctcttgtcattcttggttttacaggctgatcagatagctctcttatattcacgttgaacttctcaacaaggtaatcactaaacttcgcataagcatgtttatctatcatggtaagagcagtgctagtgtgaaagtcaatgcaagattgtaaataagctgcgaatgtttcgtccacggctgataccgatagcaaagctggttcaaataccctccctttagcatccttcacagatcgtaaatagagaatggcattctttagttttgagaaaacggtgctattattttttttttgtaatccatcgagtatgttgagattgtcgttgcttgaaaggtcgttttgcttcttccgcatgtccgcttcttttgcttgcctaatgaatagtattttagcttttttctccttcaaatctgctatgtcatcgtttaactttaatcttttcgcagaagcagtactcaaattctcgtctacttcatgaatcttttctggatctggtaaaacaactttgtttctctcttcttccagtgctttaatcttctcttcgtttacctttatatcctccttcaaagacttatttctggttgtaaggaaattcactttagattcgcattccgacaaatatttggaggttttttgaatgttttctgtgctactgttgaaactcgttttagcggaatatcgccttctactcaaatcatctatgtcacttttacaattattttcgtctgcagtcaatcgaactcccaataaattaaatggcttcgattcattttccatcgtcttcacttcattcctcaaagcattacgtttatccttgagaccacggattttctccttatgttctttaaggtacgtgtagtttagtaacttctgatgaatatctaattcacgtgccttctcttcatagagttcgagcgcatgagcctggctttcaagagctgcccttgaagaagtcaattctttcaatttgttttctttggcccccaaatcgatttgtagttcatttccttcagcttgtaatgatttcagttcagaaagtttctcgagaagtcctgcttctatcgatcgaattgtttcatttagtagcgtatcaggtttcaacctagcaaactcttcgacacgctcctgtgaaaggaattgacaaaggttatcaagctggatatttaatactcgtaccatactttttacaacttcctctgttaccaccttgttgttaatgtagtatttggatttcttcttttccatactcaaaactctttttacatggacaacgtcatcatcagtattgatcatgttaaagtcagaatgtaaaagagcacttgagttctttagagttatttcgatcacaccttcatctgtcccatttttaatatattcttctactttcttggatcttccgatatactcaggtttacctgctaaacctaagcaaatagcacatacaaaagtggatttacctgaaccattgggaccaataatcatattcaacgatggtgacaaatggaactctgttaatgcatacgtaacgaagtttgttagtttcagttttacgacagctcctggttgaaattcattcaattccgaatgttgaatccttaatctctttgttgacaaattcttcgagttatttgtacaaggattaatgtcatcgttaagaagggaatctgcagtatcatctacgtaatccccgaaattaattactgatgtcattgctgattgagaaggggccattcataagcaaccccagcacattctactggtatctttccacgaactccttcgtgttgcaattcacgtaatgaatactaattgtaaaatcgatctgtttttcttttaagtatttcataacattttgactaaaagaataaagacatctctttctacaaacactttaacgtgtggaatattaatgtaccgtcatctagagaaaagcattagcaaaaggttgtaaaattatattactgctgcaggtgctttgtacattgctagtgataatgtccaagaaacgtggtagaagacatacagccaaggaggacagtaatagcgattatgaaactgatacatatggtttggcagatggggatgataaatcgcggccatattacctcgtagaagaccttccctgctctctagagcccccacgttacgataccttcacgtatccactatctgtgaaagattctgctgtactttacagttctttgttaagtagtaggaggacttgggtcaaaggtgaaatgtttcaattatattgggcgaagcagtatatgaacactaaagagaaggaagaattgaagaaagagggtatagatcctgactctatcgaccagtctgcagcaagagaaaaaatgaataagctatgcgattgcatgatgcaaggcggaccgcatcagtttccaatacggttgttcatcttgaagaacgatgaagttgaaagggcatggaatgaagctaaggaagcaaagaagagagatagggaagtacgaaagaagcaacaggaggaggagaaacggctaaagaaagagcgtaaactcctgagaaaaaaactgaaacaagaggcgttagagaaagagaaagagaaaaataaagataaggtcaagaagccgagaaagccttacaagaaaagtgcaaagagacttgaagctgagaggttaaagaaagaggaaaaggctaaagcagctgctaatacttcaggagttaaaaaaaaaataagtaaaactagtaatgtcaagaagaagaaaatgaaagctgtcgtaaggcctaaaccatacgaagaacaagtaatgattttaaatttgaataagatggctagaaacgacaagcaattgaacgatttgatgattaaagtagcaggtggtcaggcaagtctggctgaaataactcagttcaagaaatatattgaaaaggcaaaggctatgcctcctcccagtggaacttggaagccaatgcttgaagaagttgaagtgactgatgatggggaatctgatgaagatgtaaaagagcttgaagtgacagaaaaaagtgaagatgtaacaccaactgaagttgctttaccaaaggctgcagttgctgctaaagaagttaaagatgttgtggtaactccaaaccttccccctggcaccgaaaattctggaaatggtaaaccgccctcattagacgaatccaacgctcaagaatcaacggatgtgaacaaaaaccagccaatacagaggcttaacatatctaaaaatgttcaaagtgtgaaaaacgacattactgagaatacagacttggcttccaatgagcatatgaacgaaaagcaggtccagaaaactcctgaaagtacaacagaacataaacctgacgaaaaaccaaaggacgctgctatgagcaagagtaatgaaaaaaaacctgatgaagatacggcacaggacacctctaaagatgatgaaaataaatcggataaaagcgacagcgacagtgacagtgatagtgacagtgataacgatagttctagtagtgatgaaagtgataatgaagacaatacaagtcaaacaaagaacagcatagataatactgatgatggagtaacttcagagaaagcagatactaatacagatgtatcaagtgataaacctcctgatgacatcaaatccgaaggagaggtcgctgctcctcgcgtaaaaagaaagtataggagacgttctaaagttaaaacagaagaggaggaagaggaggaaaaggcaatgcagttgacaacattccagcagaagtattcgaatggtgctgatatggtttttgaatatgttgaaaatgccaatgttcgtttccttctaccaaaatattcaatcttggaacaattggaaggtgaagaaagctatcttttatcctttattgtggttcataataggcgagaagttgcactttttacgactcgcaaactaaaagagcttaacaagaaaaagaacaaagaagatcatatcaaacctgaagactataacccatttgaggatgctagatgtcccgatccattattttcatctattacactcaaactaactggaattccaaagaaattttccaatatcattctaaatagtttccatcctcaggaaagagtgcagctctatatgaaatctatcatcgaccgaggcagtaggctcagcggatacaacctctggtaccaacttgacgcatatgatgataaagaattggctgaacggctaagagtaggtttaaaagaatatgaacagacctttaagagtaaaagacaaaagaagcaaatcttgtgaaagcaagccttctttttatgtattttataaataatgcattatatgttttcatgaagtttacgctgaatactgtaactgtatgccgaacttagatgggctaatcaatgaccagttttgatgttccaatgaatcaaggccgttagtggagatttcaggaggttgtgtgagttctgccccagcagatattaaaaatcccctgatttttccttcccacaataagcgcaaattcatgtcacgtaaagatgtgctgactttgaatacctgtgtgaagtttgcttcgctatatctctcattgaaattctcgatgacgttacgttctttgtttatcttttgcagtgaagactggaaagttagattcaaatctttcaacagtctctgggaagaagcaccggaattttccgttcgcgtcaatagatggtaatacattggagtcttgtcatgcgataattggggccaatcctcaattgtttcaacaggttctgatggtctttctacaggaattgatgatgaatttttccacagttccattcctagtgttaaatttgactgtatagaatagatgttgaaatcatatttggtacaaaatgtaaggttttcatgagtcttgattgaataggtagaagaaacatgaccgtataatggattcagagacaaggtgaaaatcaatggtttcccggtgttagtagcatgagaacaatatcttaaagtagttgagcatccagggctcaggttcaataatgcacaccatatttcggatccaatggaaaggcttgaattgttgtatagtgaaaggtttgatttagaaccagctgaaacaaaattatgcacaaacctgtaacctagcaaagcttcattggtagaaaatatgagttcttgacaatttatcccagtgtttttctgcaaatacatagtcaagatgctcgatccgctcttggaacttgaacatttcaaaatgaactggtagtaatttggaaaccgcctgatgtacattgcctccaacgagctagaaggataaaacattcgcccatacgctaaagaaatcggtaattccggcactttcggtacttctaacttggaattatttttataatgatggtagtagggctcaatgtaccggaaactttgagtcatttgctgcaaatgcactgatgaagatccctcgataaactgatctaagttctcacaattggtgtataaatatgttaaagagccattgattgtcttattgttagttagctctaacgtattgtaagaataaggtgtggccctgttacttacttgaaccttcaaggcagtcggaatgtcaaactgtagaatattccgactagttcctactatgttctcataactgttatctttattccatgacgtgcattcttcaaactgccgtagcacataatccatatattccaacatatatctaccgaactctggcgtcccgtaagaattgttactacaaagtatcgcctagtttcctgaatccaatgttgatataaagttgacatattttaaaggtttcgatattcaacattttttagttttttttgatattgagtttaacgatcatatgtatttaactattttcacatttcatgcatgcagtaacattggcaattaaagataaaagtaattgagaagtgagaggtttgtttgatctgccaattagtatatcgttgcatttctgtgccctgtgtgaagcttactttcggaataactttctttttgaacgttgaatcttctcctaaagagactgttttatttttcaattgaagcatttagcaatcatattaatgattcttgagtgaaccatttgcgagtaacgtatcagaattggcttatcgaactactcattacgacaattataaagctcgtagcgtctgatatttcatactgtaagaatcatgggagatggtgatgatgattcagttccagaattaaaactttctctgacatctaccccggtacatacaacaacgtcatatggcgggtcgttatcatctgaatacacagactccccatggggtaaaagggggcacatatcttttagtggtacgccgacaactaaccggagaaggaggtcgagcagtcgagcgtcgagcaaaaatgtgaaaagcagtgaaatatctccaatatcgatgatatttcgcaatttactaattctggaggacgatttaagacaccaatcaaaggagcaaagaatgcttaaatggcaattcactttgtttcttgcgggcttagctggcattgctgcgttttccttttacgaattgtatttttccaatgatcaggttaccggtttatatagaatagggttgcaattcctattgatattcatttcagtgacaatagtattgtttcatcttagcggtgaatacaaaagaaccatggtaataccaagacggtttttagtcaacgcaaataaagggatgagacaattcaacgtaaaattagtgaaggtgaagagtacatggttacaaaactatgcggatacaatacgtattatcattcgtcgagtatcaaaatggaatatgaagcttttgatcacgatgggagctacaaacacctcgatatatgcattttggtcatcgctttctatacgatgtctgcccagacttggagctgtggatgttaagttagtgctcaatgcaaaagcatttagtgctgagattcgagaaggttgggagatatatagagatgaattttggaagcgtgaaacggtcagaagacgtaagcaagagtctcaaaacaatacgcatctgaaaagagactaatgtttgagagtagcagttccgtgccatatatactgtatacctatttctacaacatagtaatgttaatataataatgatttcaaaaggactcaaaagaaacttatcagagtagcggttctgaataaaggattttatcgttcattaaagataacaattcagcaaatgtgcaaaagaataactcatcatcaagaatccaagccttatagtaatatcattctatttgttgttttttaattcaagagattgatatccattatactaattgcttgacgcctgtcaaagcaagaaaacatcattgcgagtaacatcttagtataatgaatagcgatatcttctacctccaaagccatatctgaccgttggacggctgttgggcagccgttagtgctaatcccaccccactggcgattgctcagatttgaagcaacaagttatctaattgggatgaaaccacagaacgtggaatttttcacttgcaatgctaagattcgcttcattttctgtccgggtaacgtttgatatcgtatgttagggtttggggactgaaggcttggcagaaattcaccatgatagagatactaaatggcaatttgtgaggaccttgagcatcactctccttatccatttatcttatgggttgacagctgattcataatctaagtgttgcaggcccctataccagatttaatcgtattcataatcttagtagtgatataaacgaagtaaagcagcataaaaacattattcgatcacgtgattaagtacttggatggatttttccttcagatttttgaaagtgtgatcccaattgtgccttaccctgactgcccctttccgattttcactcaaaaccaaaataacaacagaaaaggtttaaattcaaatagaaacaatcatagtgtgatatatggatttattaggatttgtttttacaactgctgtctttactgtacggaaagtgaatttacgcgcaagatcgttaatttcaaacatttttatcaattgctgataaaataccggttttgtttcctgtttgtcggataataaacactttagacggtattttgttttttcggtgattgcataaacaggtcataattattactattaatttactattaatatatttatcttatcagatcacagatcatagatcatagagagagatacatttggaaagagaatagttctcaattagttgagaaggaattgaatcaagaaaaaaacgtgttgagctctattcgaccggtctgcttgtgctatattttccaattttggattagtcctgtcaaatcccaataagaaatctttatcctgattaaggtgtttagcaacgcagaggtaaaaagaaaactagcaacgaaagtgtctgtttgatacaatacttacacacggcaagatgatgcgtggattcaagcaaaagttgataaagaagactacgggaagtacgtcttctagttctaatcaaaaacggaaggataaggaaaaggaagaaaaaaaagagaaggaacactcaaagcgatctcccagtacttcgggtagttcttctgcaagatcatcactagataagactagccatagatctggaagtaccggatcgaatgccggtagctctagaagagtagattcgaagtcgggtagcaataaccataataatcatggtagcagtaatagtaacgccagcggaagcggtagttctgcgaacaataatcagaatgatggtgtgccaaggactccatccgttaacataacgaaagcagattccaatgcagttggtaaacctactttaataggagctgcagctcaagtaacaccgcctcctacaagcccaaaagctcagccggcttctttgaatactccatccagtgctaccggtagtactacagtattgaaggattctcagcgttcgccaacttccatagaaatacccagatcgtctcattcttttgaaaggttaccaaccccgactaaactcaatgcagacagcgaccttgaaatgataaaaacccctcagcgtcactcttcttctagatttgaaccatctcgttatacccaaatcgtaaaattaccaaggttcgaggaggtcctgccagaagaacaaattccgttattcattactaaggtcgaccaatgtaacacaatgtttgacttcaatgatcctagtttcgatattcaaggtaaggaaattaagagggtaactttacaggagttgatcgaattcattgttacaaacagattcacttatactgaagagatgtatgagcatgtggtgaacatgttcaagattaatcttttcagacctattcctcctcaagtaaatccagtaggtgatgttttcgatccagatgaagatgaaccggttaatgagctagcatggccccacatgcaatatgtttatgaattctttttaagatttgttgaatcaccagatttcaatcatcagatcgcaaaacaatacatcgatcaaaacttcattttgaagttgttggagctattttccagtgaagacatcagagaaagagattgtttgaaaaccactttgcatagaatatatgggaaatttttgtccctcagatcgtttataagaagatcgatcaacaatattttccttcaattcacatacgaaactgaacgattcaatggtatcgcagaattattggaaattatgggttccatcatcaacggtttcgcattacctttgaaggaggaacataaagttttccttgtcagagtattaataccactacacaaggtaaggtgtctttctttataccatccgcaacttgcatactgtattgtgcaatttttggaaaaggagcctctgcttacggaagaagttatcatgggattactacgttattggcctaagatcaactctactaaggaaattatgtttttaaatgagattgaagatatctttgaagtaattgagcctctggaatttatcaaggtagaggtgccattgttcgttcaattagcaaagtgtatttcttcgccgcatttccaagtagcagagaaagtgctaagctattggaacaacgaatacttcttaaacctctgtattgaaaatgcggaagtgatacttcctataattttcccgcccctatacaaactaacctcacaactggacaagaatgatccgttgagtttagaggatggtgataatggtgaagatccgtacttaatggtcgagcaagccataaattccggctcatggaatcgtgccattcatgcaatggctttcaaagcattgaaaattttccttgaaacgaacaatgtcttatacgaaaattgcaacgcactttacatatctagtttgaaagaaaacaacagacgtcaaaaagagagggaaatgaactggaaacaattagaggattacgtttcgaagttgaagatcgcagaaagttgaaaaaaagtgaccactatcatccttacggactcaccatcaccaaatcattattatcgtcttcattatcatcatcatcacggtaaaagttatgtatatacttatatctacgcgtctttttcaccgaacatagaattgtttccgtatatatcagtaaacgacaaatgatttccaacccaaataggaggccttaatttacatataaaatagtaataaaggtactacttgactgataacttgccgcttatcactttctaactgacaattctatatattcttttttataatgactgtcacccaaatcctattcttttcagcatgttgggttttgtatgattcttaaatttcaacatcggttgaaaaaaaagggtcgcaggctccatcgtcagtatggctatataaagaaatattgagaagtacgtgcaaattgctattgagttaagaaaacgacaattcgtagacaaaatcactgtttataatttaatctttcgataacgaagaaattcggttagaaatcagtctcatttagttcaactcagaattgtgttttatatcctcgagtgaagacagaccaatcgacataataggtaaagaattaggaaagatgttcagaacagcagcaagaaaccttggcgtgccattaagaagaagtgtttatgttggattcagcggtagtttattagtcggtggtggatcgttgttgcactcgatgcaaccaagctcatatatcatgaacgattcaattgttgatgttaagcaaagaacgaatctaccacaagagcttggattgccaagccgtgttgatataagttcgaagcaaagaagagtcaactacagacaaatgtgctacgggtcaattttaggtctagtgttcggtgttatctttggtaagatatcaagtcttctcgtgttcatcaccggggttggattcgttgggttacaattcttgcagaacaggggagttatcagcagtgacagcactcgttctctttccaaatacgttgtgaccatcggccgtgagaggattgatttgaacacattgatctgggacaaacccagcttcaaagtctcattcatcttgacatttgtgctagctgcacttaacgtctgattggttccgagaacgctaccttattcagttcacgtgactttttctcatgtgaaaacccagaatatcctataacgttatatttaagaattagtaaaataattattgtgtgtaactcgcttgtaacatgattaattaccaatcatcaaagacattttcataaacgactggtaggctacattagactgggttgtcaaggagataagggagtttaaactaatgagtatagttcatccagatacctcgaagtacgagtttaatttcgagccatttctacggaaagaatattcgttctcgttagatccagatagaccggtatgccaatactataattcaagagaggggataaaatcctgtcccaacggagcacgctgtccaaacaagcatgtgctaccgatatttcagaacaagattgtttgtaagcactggctccgaggtctctgcaagaagaacgatcaatgtgaatatttacacgagtataacctaagaaagatgcccgagtgtgtattcttcaccaagaacgggtactgtacacaatcaccggagtgtcaatacttgcacgtagatcacaagagtcagttagaagaatgtgaggattataatatggggttctgtccatcgggacctgcatgcacgaagaaacatgtcaaaaaggtactttgccccagatacttggtagggttttgtccactgggtaaagattgcgactggtcgcatcccaaattcaaagtaccttcagaacacagcaaactgcgcatcaagaaagacgagcatattaatacaagaaagatggatgaggaaagggaaagacgcttgaatgccattatcaacggtgacatcctagtcacgtgactgaattttttcagttttcatcagtgcgttcgttctcagccactgctgctgtcactattcactattcagctcaccatacgtaattcgatacagatacagatactaagtaacataatactacacaatgttacagccggataattctatcaaccgacagcaaaagcaacacacctgaaaaattaagggaaccaaggctcacataccttaaattgcttatccaataggtatcagacctctcagccaaaatcattcgctgagtttcatttatggacacgcggtcgacatattccccagtatagaacactccattccacagtttctttcggtttcttttttttcttgcaatactgataagcattaaccctgagagcggacgcatgaatgtacaccaggcaacagcgtgagttcttgaagtcagttttctaatacacctataactggcactagccagctactgggatggcagtctcgcatcacagcaaggctgtcgaccggtacctcttcgtcacttcgtctctcctctgctgctgtctatgaaccagcgaggttttgctcaaaatggaaaatgaaattttcgacgaaaacaaacagaaataaaaaaaagggaaaagggtaaaaaggaaaattaatggaagcaaggtttttccaaagcaacttccggccacttttaggagaattgccattgcatttggtaatttatttgtatatatatataacacttctatatttaaaagtaaggttactattgtgataataacacgcaagctattaatattgaacatacgctcagttatatagagttcatttgatcgagtaatagttaaaaaaaaagataaagacaccatatattacaaccatgcacagaacatattctttgaggactaccagggcaccaactgcctctgatttacagaatccaccaccaccaccatcttctaccaagagcagatttttcggtaagggtggtttagcttacagtttcagaagaaacgcagctggtgcgtttggtcctgaactttcacgtaagttgtctcaattagtgaagattgagaaaaacgtgttgcgttctattgaattggctgctaacgaacgtagagatgctgctaagcaattgtcgttgtggggtttggaaaatgacgatgacgtttctgatatcaccgataagttgggtgttttgatttacgaaatgtctgaattggatgaccagttcatcgatcgttacgatcaatacagattgactttgaagtctgttagagacattgaagggtctgttcaaccatctcgtgaaagaagagctaagatcgctgataagattgcctacttgaagtacaaggacccacaatctccaaagattgaagtcttggagcaagaattggtccgtgctgaagctgaatctcttgttgctgaagctcaattgtctaacatcacgagatcaaaattaagagctgctttcaactaccaattcgattccgtcattgaacattctgaaaaattggccttgatcgcaggttacggtaaggctcttttggaattgttggatgatgctccagttactccaggtgagactagaccagcttacgacggttacgaagcgtctaaacaaatcattatcgatgctgagagtgccttaaaccaatggactttggactctgctgttgttaagccatccttgtccatcagaaacttcgatgatgcttacttggatgaagaagaccaagaacaatggaatgacgaagaagctgaagccgaagctcaagaagaacacccagttgctgcttaaacttctcactcttctactccttaggtgcttctaaaaatctcttttgtcacaaatttattatactcttattcgcccctattcgttttgtttcgattcttttcaatgagtagcccactggctggcaagcaatttttttctctattcgactaaccttacctgctttaatataagtgccaactactatctcttaattgtcgttttaataaaatacaagtattaactctttaaaaagagaattttaggggaagggacttttcccaaaaggttttatgccatgagaatataggaagacaggtgggaaattcaatttcctattccttttgcatctttttctttgtgaatgactatgccttacactacgaaatggctgtcttctgatcatgaattactttggtctgttctttgaatgtctccatcgcataatcttgaaattattggacggaaatactgttgaaaagattcagaaactggaaacgaaaagcaaagcgaaagacacttacaaagaaaaaatgtttttaatatatatataatattgatttaaggattgacaatcctcatttacactcattgtttctccctatgtactactatgtatcagcaattctaaaataatctgaaatttctattaagtcccttatacctgtgcattttctcaccacgtcaaactttaaatttccaactgaaaatctatcattcaatgattccaaatatttggcaagtcaaagaatataaatgaacacttataaatgcaagaagaatagggaccaaacactgtgtgactgatcaattgcatcattgcttctttctcaagataatataactctcaatactatggaaattgacgagtttcaactcgattcaaaactatcgaagttcgagaatctatcgggcaaattatcgaccaaatcacaattaccaaagctacttcatttgatagaagctgattatagtcagacttctaacgctttaaacaactatatcaaaggctcaaataataaaattaacaaatcggtaaggtccttggagttagggaagaccaatttaacatcaacattgtcttttttccatgaagccttggaatctctatctaattctaacgtgcaatcgatatcaatttccaataggcttaattccatcaaggatgaagcagaccatattaatcaattggcagattttgtagattctgtcaaacttttgaagaataacctaaaaataataaatgatgcattagacacgaaggaaccaaattacccaatgatagcccaatgtatctatgagattgatcagctgccagactctataatacactcgcagtttgttcagcggtgtgtacccactagtgaacttccagatccaccggttcagcttatagacaagtggaaaactcatctctgcaaagtattttctgataggtttaccagagccacaagagacgtggatgttggcacattgactgaatgcttcaaactatttccaaaaattggtgcttcggatcttggaatagatctttactccaaatatatatgtgataacattgcacaacaatccaggacgttaatgacacatacttccggggacccattattttattcaaaatccacactacaccttttcaaaattgtttctacgatgataaacgaccattccaagattattttgcaaagctattccactgatttcatgttagagatcatgcaaaaagttcaattagagactgatctacaagcttgtttgatttgggacaccttcactgatgatgtttcgttggataaagtcttcgcttcattgcaagataataatgacatgaggactttacaagccattatcttacaattttcgaatttcttgcaaaactggtcaatgtactgccagtttttctctatgaagtggttacaattcactaatgggtccgtagatccaatcaagattgtaccatgccttaccagcggtaagttcaattcaaaattgcaggacaatattgacactttccatgcattgactatccattacaccacatactgtttcaagagttctttgaaaacttcatgcatgccgaacttaaatgattctttggatattacattatctcaaaatactgaaagtaatcagcagattatttccccggtattggaagatctcgcgattcttataaaatcctacttggtttggactctaaattcgggacaaactgaattagttacgaaatctttagattcaatttcccaaatgattcaaaatgagtacttaatcagtttcgtacaatcaagcttgaccaaattaatacctaggttaacaccggcattgagattgcaaaaatatatatctgcgcccaattacccaatggatacgcaaagcaaatttacatcgcaattcgcggcatttaacctcaaggagacagatatggagtctgttttgcatttgcatcattatatcgtttaccttaacactatttctacaaatgaatcgatatttaaggatttgtttgagaacgaaattataaagattaatccacactttttgattgataatttcaaattcaataatgaacatgagctagttaaaggtaaacttctatctgtgctacagtatatccttgataataataagaagctttggaattgggcaataatgatgctatatcaaaatgttctgcaagaaaacctacatcgtctactatcggtactgttccaaagaaacaccgaattcttatccacattacaggattttgaagactttgaaaagctgcacaagtttgtagaagagtggaataaactattaaccccatacaaacaagtcctctccgcagcatctttcaacaatcttttgaccactattgtcaaagatgtttgtccaataatagagaacaagtttctatccctacaatttaacgaattaggttctatcaagattgagaaacagctatccattgttatcaaaactataagcatggacaattatcaattacgtgagtggtttaagaagttaacccagatgtgtctcctcttaggatttgaagacgaccagtttgactcaagcactcaagatctaaaagatgacgtgctcaattcattgaactggttattgacatcttctgaacgtatctcaataagacaacaacgtatcgacaaacggtagattggtgtcaacacatatataatatctgtagaggtctatagtgtcacatctctcttaacgtgtaatttatagtcaaattcgttgtcactcttcacgagttgatctttctttttcttcaggttccattttaacctgaaattaagaagttgaatatcacatttgttgatgtttaccatttgtctaaggtaggtcatcggcaaggcataaaagcaacaaatacctgtgtatcgcgatggatacggatcgtagcagtgtaggcataagtcctgccgagcatagcgtaccgttggaagcatcaaaacgcgatgcagatgctacaggaacgattgtaccagaggaagatttaaagctagaacacataccagacaatttggagcatgcagatttctccaaacttcttgaacttgatgagaagaacgatgatgatctgtttcacggaattgatattttagatcagcaaatgaaaagcgaccaggggaaagaagatatagaactacgtgtagaagaaccgaaacgagaaatgaaagaagatgagtcctcaaatgtgaggaatgaggataaacaaaagctagaagcaccagagtctccaaaatctatgccggccattcataatgatgagaaatctgtgaagcaagtttatccattagtcaagcatgaggaaaacacgccagctgcaataatacaagaaagactggcacataatttgcagagacataactcattaacgcctatgatgttcccgctcaaacagttaaacgagctcaaatcagatatgcaaaacctaaagttgaagacagaagacggagcaaagaactcaccccaatctgatcagaacacaagccaaaaaaatgccgaatcgccagaaaatggtcagcaagttacgcaactgcatcctcagttattgcaagctgcagatgtgaacacgcctacctctaatacagtccctggagcatcggatgaacagtcgaaaatttcagcatacgcaaggttagactttcaggactttactttctacgttcaaacacttcaagttattatcggaaggcgatcggaaaatgattactctcataaagttgatgttaatttaggtccatcaaaatcaatatctagaagacatgcccagatattctataatttcggtacgggcagattcgaattatctataatgggtaaaaatggtgcatttgtcgatgataactttgtagaaaggggaagtactgttccgttaaaaaataaaactaagattcaaatcggacagatacccttccaatttgttttacctgatcatgaaggtaatatctccaaggaattggcatcgaaaagtaaaaacagcactgcgaatgcaagtcagcccccaaagaaaaagaataagaaagaaaaagaagttaaagaagttaaagagaagaaggctcctaaacctccaaaacctccaaagaaggtttacactttgcaagaaattcctccagaatataggactaaacctacgtgctcttactctaatttaattacatcttgcttgagaaaattttcaacagaaaagggtatgtctctctcagagatttattctggaattcgtgaacttttcccctactataaatattgtccagatggatggcaaagttctgtgcggcataacctttcattgaataaatcgttctgtaaagtctcaaaggaagggaaagggtggttatggggattggacgaagaatatattgctgagagagaaagacaaaagaaaaaacaggcagaggcacaggcagctaaagccaaagttgcagagctgaagcagcaacagcagcaggaacaaaggctgaaaaagcaacagcaacaaagttctaattccaaacaaccgaatatggcacagacgttagcggctaacagatctgataagaaaactactagcatggatgacaatcaaagaacaatgaaatacttacaagaacagttaatgattttgacaaaagatcgtaaaggtttagataagtctcttatggcacaaattttaacacaagcattagcaatgacaataaatcaagtgacacaggctgcaaagcaaaaaggtatcagtgggaacccattaactgcattaatagataaaaatccacaacatctgaatcttattctagcggctgcagtgaatgccgcaacagccaaggtcacaaagggtaaggtaaatcaacttgtaaatatgcctcctcctacggtgaaggatcagcaaccatccgctaagaaggaaatccctattaaaagagctgtcaccccgaaaccacctacgccaagtgtagtgaatccagtacatgcaaattcatcaaataaagatcaatcatttgaccctacatccttatcaaagttttttcaaccaaagcagcagcaaggctcgaggccatcctcaggtatggctaagacgccaactccaccagttacggtagggacacccaaatctggtgtggttagtaatggaagctctgttccagcgacaagtccacaagctacgtcaacagtggtaccgaaaaagcgtccagctagtgacacggaatctagcgattccgatgatagcaacagcagtgactccgacgaacagaataagaatggtgattcctccggagagtcatctggtgattcgtcttcgtccagcgatagtgatggcgattctggatctgaatccgaaactgatggcagtgactctgattcaaattctgatgatagtgataacaatggccatgataatgatgacggtcagagtgattaggagaacatgatacattcatagattaattaactatcttcattccaaatgtattaaagtgttagttaatatatatatatatcaatcaaattgtaacaataaacccaaaagttacagtcggaaatgttcgatggaagaaggaaacattaagttgggcgattgagtagtgattgcactgaatccacgttgaacggctctggtcgtagttcccacccattaaatacaccatttcggtataggacaaaactatgtatacaatatatcttagtcataggagagagaagttattattaaattatattaactgaagtgagtacaattattgacttaccacattattgaatgatttctccttttcttttatttcccagaataaagtatctacgttatgattaccatgataaacccatccgttttcggtgacgtgatataagttaatggacccacccgaataagcatcacgatgagcagctgcaagaatagaacgtttccctatatatagcgcttcttctaccgatagatcccaacggtaattagcatctagaacaccataagcgaatgtttgccctgaacccacacagaataggtcaccttgcaatcttgttccgtcagaatcgacataataaatggttgggccctccttctttgtatacccacagatcatggtacccattgacaaaccagcccctttatattcataaaccaaattactcaaaatctttgatgctgctgcgacggaaatcctttccttttctcttaattcatgtaaacggcattgtgatcctaaccaagtttcccaaaattgacaatcagcagcaccaccggccatggtacctagcaaaaatgggttgatttcgataactttcttcaccgtttgtgaagcaatccattgacctgcagtggcacgagaatctaccgccacgataattcctcctttaaatctgaacgccaacgttgtcgtaccatgggcaatcttaatcttacaatctggattctttgaatcatcggtgtgagctctcaaaaattgttgcggtgtgctaattggtggcatggataagcttggtgctaattgtttgaattgagagtctcccagcacaaaattttctctcaaagtctgctcatcgttcaattcagtgaaaacactggaacgactgaaatcgtcagctatggcttgcattgtaataggatgcgtatataaattggataaatcttcctcgtttcaatttatgacaaatttagtccaaagttgattcaagtagatgctaaatcctgattgtatattatgacttctttcttcttctttaactgtacccttttgccactcaaggctctaattgtttaagttcatataatctcagaatgaaggttgtaattcgggtttgatatcaacgattgtatgggactgtcaaatgtgtagggtaacgatacatcatccgtacattctctaaagtatccagaattccaaattcatggtgtacggatggttaaattaaaagtgtgtacatgatattattactatatagggttatttagtccgtgagactcataactcgctgtgcggtaagggcgatgagagacatcatctaatacgacaatataattcccgtccttggtgatcatttggttctgctactgcgatctttgggcgacaacgcaactctttttttttgtttggagctttcgcctagtgaaaaattcatgataattcccaatggatggaagaacagcttgacctagggactaagttacaggtttgatgtaggattttttttcattgaggtttttcaacattggattcactatacgtttaggtacatctattacatatttaaaagtattctcgtattagtggtctatttcttttattatttgtaggttttattccgctgtacacgtcaacccacaaccccatagtccaagatgtctgctaaagctcaaaaccctatgcgtgaattgaagatcgagaaattggtcttgaatatttctgttggtgaatctggtgacagattgaccagagcttccaaggttttggaacaattgtctggtcaaactccagttcaatccaaggctagatacactgtcagaactttcggtatcagaagaaacgaaaagattgctgtccacgttactgttcgtggtccaaaggctgaagaaatcttggaaagaggtttgaaggtcaaggaataccaattgagaaacagaaacttctctgctaccggtaacttcggtttcggtatccaagaacacatcgatttgggtatcaagtacgacccaggtatcggtatttacggtatggatttctacattgtcatgggtagaccaggtgccagagtcaccagaagaaagagatgtcaatctaaaatcggtaactctcacaagacttccaaggaagacaccatcgcttggttcaagcaaagatacgatgctgaagttttggacaaataaacaacccatttaaactgaaaaagtgtcctatctatcgttttatcaaagcaagaatattattatatcgtaatatatagataaattattatttttactgcaaatattagaatatctatattgttgccttttctaaattgtcattcaacgtcaaccgccagcggttattcaatgaatcaatttcctgtctatgagattcttccatgttagttctgtattgagataattgttccaactgttgtttctgagtttctagcacacctctgatctgttctgtaactgacttcaacatttcttcttgtacaataagctgtttcggcagcgttttggatatcagtctttcgagacacaattcctggtgcttcaaatatgcgtatcggacttctgcggacatttctggtctctcaagccatatttgacttctccatttttcaatattgccatccacatcctcataaacattgaaactttccctcaaacagccgtttacttcaatttcttctcgaaatatgtctgccaccttgctgtgtaacgtcgtctcatcgctggttacaccattggcttcaagagtaattttctcgagatactcttgatatcccaactcagtattcattttcagtacagagttcatgtttggtctggttatttagtcttttcggagctggaattagcgaagagtgtttcttagaacagcttatcgatgattgcaattaagcataagtgccccaatgtctttatgcatagacaggtttttaatatggtttttgatatcatcttgtacgtgttgaaaaatttcatgttttcaacatttctatgtagagcggaaactagccagaggaaagcttgaagattgaatcaccacatcacagtagaaaaacacgcttcatcagctgcaatcattgggataactcatcggttattggcagaggtaacacaattaatactctgatttggttgaaaaagccagcggtaggaacaaaggtctgattttaatcctcatataacagtcaaagcagcgaatgttctctcggtttttcacaagatcggtttcaactggtgtagagtctcgtgcggtctttgacaacttcttacaatttgtcaagacaccacagactctaagaccatacatctaccgcaaaaagaatgctaaccgtttgttggccatggatttgaaagatccagaaactaaacttcctattcaacctagaccatcagtgttaagaccaagtgcatcagttctcaatagcgtcatattgaacgcatcgtcagctgaagagttggaaaacatggttagagattggaagaatatcacacctagaaggaaagagttctggagttatttgattccccagcatctacaaaacatgttgttaacttccactttcaagtttggtgctttaggagcagttttgaatgttctgtaccaaatacagccattattggtgaaagcaaagcaattagaagcctataacgtagatgtatggtataatactgtattgatgtgtcaattgcatagaaatgcgttccaaaacgttcaagattccggcatggtagagagaggcctaaggaagttatcatcgactgttaccaaaagagaagatacaactggtttaacaaaggaaattgttcaagctttgggtagacaacagaacgttgaggtgaaattacctaatttcgctagaaatattgaaattaacttgccatcgatcgatgttagcactgcaagccaaaatcaattaaggactttcttgacaaagaacaccacccagtatttgttgagcagaacagcattagacttcggctcaactgaagctaagctgcaacagtttgttgaaaactatcaagccgttttagcgcaaaactcggttgctgacatttacgacaaatacgtatcccaatacaaacagctgttaactcaaaaggctactgaatctgaaacgacagaagaagctcatgcagatgcacaagcagaagaaacgaaataaaggatagacttatccgtaaccaatatttcccagaaccgttcatgtatatatatataagaatcaacgtcagttaagaatattactagaaattcaaaaaacattaacaaaatgaccataattcataaagaaactcacacaatatacttctattatataattattgatgtgccgtcacggattcatcgcaaattgagtaaatgttcgtcaattagcgcctggtaccatgtcactcccgctagccaactcgggcactgagtttgttcgatctgcaaggaaatcaccgtcaacgagttttccatcattctttttaagaatttcaattttggtgaaattattcaaaagctgacataaataccaatcgatgatctcgcagttcctgtgatccaacggaaatctattggcaaataacggtatactttgaggtatcaaatcaccaataatgacaggaggagctaaggaggcttcagggaaagaaactaatactgaaaagacggcaaatgcacaagaaggagaaaaacctttatctaataaagagttgaaggaactgaaaaagaaggagaaggctgcaaagagagcagccagtaagcaagctagtggtatctctattgaaaaacagcagcagcaagctgctgctaagcgtgaaaagaagcagcaacaaagagatctcttagctgcaaaaaagaataaagcagccgacccggtcaaacatgataccaagaagtcgactctatttggtcatctagagactgctgaagaaagaagagcttctttacttgcagtttcgagtgctatcacttctacaggtacctcaaggattactgctaatgggttagtattgcctttacttgctactacacccgcggttgcggtttcccaaccaatgtctgcatctcctttgagttcaaacctttctggaagcaatactaatttggcaggtttggctcattcagaagattttgaagcccatcaaatgctaaattccttgtcccttgatgaatcgtcttcatttgtcccaggaatatcatccgtcattccaaataccatgacttcacaatttacaaatcaacaatcgattgcctctgtaaaagaattgattgccaatcgcgaaatgttacatcccgctatcacctctctgactttggattatgcattctataaaattataggttccattcctcgttgtattgccatgttagaggcattccaactggttgtcagagactacaagactccagaaggtactactctttcacgtaatttgacaagttacctgtcccatcaaattgatttcttgaagaagtcaagaccattgagtgtaaccatgggtaatgccattagatggttgaagcaagaaatctctctaatcgatccttcaacaccggattcaaaggccaaaaaagaactttgtgataagattgcacagttcgctagagaaagagtgcagttggctgatcaacttatcattgaaacagcttcacaacatattgaagaaggcagcactatattgacctatggctgttccaaggttttaactgatttattcctacacaacgccataaatttcggtaagaacttccaaattgttatagtggacagtagacctttgtttgagggtcgtaaaatggcagaatctttgagaaatcaaggtcttaatgttttgtatgttcccattacagcattgggtaccgtattcaatatggatatcaaatatgtgtttttgggagcgcattcgattctttcaaatggtttcctatattcaagagtcggtactgctcagatcgctatgttggcaagcagaagaaatattcctgtacttgtatgctgtgagtctttaaagttctctcaaagggtacagcttgatagtgtcacatctaatgaacttgctgatccaaacgatttggtaaccattgactctgctaatcctgtacagagacgtaacaacaatgggttcttattacagcaatttatcaaagagcgtgaagcgcagcagaaggaagtcgagaatagctctaagcaaaataataaatctggcagtgctaataccaataatgctactgccgacgaaggtaagaatgtcaaggataaaccaatactagcagagtgggagaaatcacctaatttgcacatcttcaatataatgtacgatttaacaccccctgactacatcaagaagatcattacagaatttggttcgttgccaccatcttctgttcccgtggttcttagagaatacaaagcatcagcttgaatggagccctttgcatatataatatacgataatatcatataatatagtaaatgaaaaattagtatagatcttcttttttattaattgcgtagtaatattcaacatcgtaggttgtttacttaggtatcggcttcatcgaggatattgctatatatatgtacaagttaagctatgatctcgatattaccattcacaagtcattttttcgattcaaaccttgtgtctgatggctgggcttaaatgtagtggagaccagatacctctcacactatcgttcaaagtatccacattgtcgttcttagttctgtgacggagttgctcaccagatgcgtctctgattagttttaacttattctctacattatcaatgttcagattttttacgcagatggctttattacggccattaacatagtcaccttttataactggatggccagactttcttactatttcgaactgtattgttggatatttttcagcccattgaatcattctgttagacgttaggaaatctctcaaaccctgtgaggaaccaccccaattacagtattgcaaagtgatctttttacatggaagcacaaaagcgccaacaccatttcttgcgatagaagtttgtctcaaaactttaacaaccattacttcagagaaatctttatgaccgcgggtaccagctctgattagaaaacaagttgggtgtattttgaaactgtggagagatccttcagatgcagaacatagattcactaatatatcttttgagttttattcgagttttcagttcatgattatttttttccaatttcaaaagaccatcagtcacgtgaacaaatctgtatgtattcgaaggtaggaggacaattcaccacatgctcacacaaatgaaaaagatactggtaccaacactgctataaggtgacgaatgtaaataatacagaacctctttccgactatattctgtttctttcacattgctatgtcaacacatcctcatgagatgtcatacgtcatgtaaacttgatgatctgtcgatgggttatgacaataatgcactaccagcgtttggttaagggtacttttactgagcaaatccatagaaagtacgatagaggccccagattctgatccaagatgtcccaaaggcttcatatgaggttaattaaataaagggcctgatttgcgttcacccatggaatgtacggattgacacctagcgtatgttggatgcacactagtaatttgttaaaaaaattatgcacatgcgtcatttaaaccaattaactgggcactccctattaagtgtgatgtaagtgtatgacactttgttcaagaacaggcaaatgtattgccataatagtcaccagtttatcattatggtgcgtataatgtccctataactattgaaaaattaaagttctatgcgtttttttaaggatgcgtataacgatgaccacccctaaaaaacattcacttgtaagtagcgaacagtcaaggtttgtatccgtttctttaatttattacggcgttcactgaagcgtttcaacgatgcagtataaaatgcgacaaaaaaatttagggaaaaaagcagaagaataccatactaattaactggaacttggtaattcatcaacggtaaatacttataaggtgttaagagtttattagcgtgtccaaagtaacatttgtattatataagaagggcagcaaatggcacttttttactaccattttcataccttttacttgcacctttatttcatgtcattgaagaattcttaatatacatagttttccttcagattaattaaagattgaacaccctcgaacaacaacctaactttactacgctcattaaaaacgattataacgctaaacttggttccctacccatacataccttttgaaattattttctctgtcactaaacaagaaagtttcaaaacgtcagttttcagaagcttcaatacctcgctacagaaaaataaaatcattcattggatccaactttacgtctatccttaaaaaggaaaaaggagtgtgaattagtgtgaacattgaactcgaagagttgcaataatcatagcaccaccaccttaaaaacaataaaaataaatacagtcgctcgtttgaaatatattttgctttcaatttaactattgaaagaacctgataccaaaaacccaagaacgttttctaagcggctttgtctgagaaaacctgaaaaaacctttttgacacatttctgcaggcaaacttcttttgtccctgcattagaaaaaaagaacttttgtgaacacctaaccaaggcaaacctaaaacaaaagctacctatggagcaatatcttaacttatccgatgatggcgaagcacagcctaatttggatttggaattaaaatccttctttgactttagtcaagattcatcaattaaccaagatccttctgcagttggtcccaacaatactgcttattcagaacaggtttttcctgaattcacatttgaaactgaatctagcggaaaagagtttcaatttggttctattgcggagttgttacaggacacaccaatgagtagagatctagattattccacagctactgagacgtccacgccacatttcacctatatggcagataacttcttggctagtaattacagtttggatgaaattgctgcgttaccgaatactaatgagcaaattaccattagtaacacaaataataacaaaggtaacttgatgcatttttctgtcggtcaatcgatgttgtgttttaataacgatatttttgacggtagaagggaaagctttgtttccgatactgttactccgattagttccaacacaaattcgccaaggagtaattctgtcaataataataaaattaacagaatcaacaacatgagggcacagaaacctaataatgtgaggtttagtttcaatcatgtaaattcatctccttttgctgttggtagctcttccagtattgcagaagtctccatggattcgatgtttccaccctcgcccacgaagacaccaacgaaaatgttgccaaaaactaagagaaggaaatcctcgtcatcttcttcaagttcagtttcatctctaactcaagatcttttgtcgatgaaagatagaagatgcatctttaaaccagccccaaagaaaaaatcagagctttatctaaggccagaaagaagatgcccaaaattcgagtttggaattcggtcggaagataatgttatcaacgtaacgttccaaggtgggttcatcagaaataccatcatggattggtatttccccagtgacagcgctcttccttctaattttcaagatgtgacaatcgaatacgatcatgattattacgctaaaatgttgaaccatataaatacccaaatcgctatgcaaaatgaccccaacatttcaagtttcaggacatattggaaaatcttgaagtgtcaaactgggccacatatcaaattgcagttcatttctgaaacattagattgcgatgttaatttttcgaacacccaatattattttaacattgtgtcgagaatcgtcagacctaaaagtttcggcccaatagaaagcggtgctaggtatagggccaagatggtgaatgacatgaaatcggacgatagtactggcaagccgagatggtgtcattttatcaccagtgctgagatgaaggggattttagatttcatctttgatggtcttgattacatagctaatgatgacactttgccagataaattatccaaaggtataaaaccaaatccgttcaagcagcatgaatctaggataagatctcatatggtggggtatgtttccggtaaaaaatgtatgaaagatgctaagaatgtactaactggtgaaaggaaagtctttgccgaggaaatgtataagcaggtcatcggatatgacgataaaaggagaccgtataacactttgaaggaatttgctgttatggaggttaaatatatgatggacaacattgaagatttgtttggaaaattctattgggtcgatcccggaactgtgcccaccggagggtataaagtccgcttctgaggtgttgtgtcatattttcactaccgtaaagcaacatctttggataatatcagaatgagaaagaacagatacgcagtacgttttttggtgagctctttgcacttctttagttctttccatcaatatcagttgcttatgcacttatgactaatattgatgtttaacttcaatatctttaaacttttgttcttcccgacgttcattaagaatactaatacactttaataattagtttaatatttgtttctatataatgacatttaattaaaaaagataaaatataaaaacatcataataactcaccagaggttaagaacaaaaaaacaaattagatatctgctaatccaatatagttaaatcaatctttccttggtataatgggtatattacatatatttcaaggaccgacactcctaccaaatatctaaaatttaccatattaacataacatgtatataaacgtcaaatcataatcagcactaacattacctaaaatacctattcatataagacactacccagacttggtttggaaatgattatagcatcttctagttcttctgcagtcaattctggaaatctcaagttgtaatattgttcagtcaatgcactcttgacagagtcaacagtgtcagtagaacataagtgtactgtacaaccaccccaaccggcaccagtcaaacgagaaccgaaagaaccattcttcaaagcaatttcacaaatggaatcggtctctgggcaagaacattcgtataatttgtcacaagattcctgcgattcattcattagggcaccaaattcttcgaagaaattggattcacctttttggaacaattgtaaggccttcaagactctcaaagcctccgaataaacatgcttagcacgttgaaataacttcaatctttggaaacgaacaggaaagttagttagatatagttcagtgaactgagagatagattcacacccgcacagttcaacggcgtgatctagggtgtatccattcgggtctaaggtttcttctactagttgcaacattttattcaatctttcgataccagtttgaatttcgccatcccatggcttacggcacgatttgtcatatttcgtgtaatatgaatccataaagtttcttagggtacccttacctaggttaccttcagtttgtaaggtaacaccgaatttctgagccaaaacgttagcagcgacggtgacttcaacaactctcaaattataattgacaggtccggtttccgccttattactaaccacaagagtgttcgcaatcaagaaggaaattggcaaatcttctgggaacttgaacggagtagccttcaattctggtttgaactccacgtacaaagcgtgaccctcgataccacaaatggaggctgcttgatccataccaccgttattaacaccgacatgatgttccgctacagctgtagtctttgtcaattcatccttgaggattggcgttcctgcaggaacattagagtatatgattgccaaagaaaccgcacagatgaaggcagcacttgaagacaaaccaccaccgctaggaatgtcacccttgacgtagatttccataccatgaactggacccttgaagttgtatttctcttgtaagaattgttgagcgactaggaggccacacttgaaataattggaccagtctgacactgatgggtcaatttcaatcaaggatccatccaatggtaagtcgaacttacgctgagcaaaattgctatcatgattagtcaaagtaatggatggattctcgctttcagaagttaagcggcacgctagcatcaaatcgttttcaatagccattggcaacactgaaaactgacaataatcgatatgttcaccaatcaaattaactctaccaggagatctggttataaaaaacttcctggaatcatctgtatcataacattccacaaattcattcttcaattgttccaattttggagcgtgagcaaaatctgttggcacaataggaacggacattattatttcttatatttcagccttgtttcaaacctgttgtcacttaaaaggattctacgatcaaatttccaactttataggttgaatgatattctcacccgtctattgaaagatcaaacctggtatcaagatatgtctcgaactgtcaaaccttttaaatgtaatttcaattcaatagaacggttcttttatagacctttggaagcctgctccatcatttaacagaacggctaccgagttttcttcggatcacttcaatccgtatcacgtgatacatacggattgaacgaatccgctctacggaatacaccaatccggaatgagcggaagactatgccccggatgccccagatttttcgtttctcagcaggcaagctaccgaccgtactattggtaacgagagatgagttaggaattaaacaccgtgaaagaaggaaagaaacagaaattactaataagttgctatcataacacgacaacctgcttgccttgcaccttgaagtgacattgaggatcaaatcccctttacttaaaacacgtatgattgcatgctcaatacgtatataaacactgagtccaggcaattgaatccaaataagaacagaaggcaaaaacagtaaactgccttccttcaatataattgatataatagactaccatttgaaggatatctcttatagaagctgtcactaagaaggaccaataatctgaatcaggttaaaggaaactcctcgaagccaaaaaaaaaaaaaaatcaacgctaagatgtctgaagataaatactgtttggtgactggtggtgctggttacattgggtcgcatactgttgttgaactttgtgaagctggttataagtgtattgttgttgacaacttgtctaattccagttatgaatctgtcgctcgcatggaattgttgactggccaggagatcaagttcgcaaagattgatttatgcgaactggaaccattgaacaagttgttcgatgattacaagatcgattccgttctacattttgccggtttgaaagcggttggtgaaagtactcagattccattgacttattatttcaacaatatcgttggtactatcaaccttctagaatgtatgaagagtcacgatgtaaagaagttagtcttttcctcttctgccactgtttacggtgatgccactagattcgaaaatatgattccaattccagagacctgtccaacaggtccaactaacccatatggtaagaccaagttgaccattgaagatatgatgagagatctacatttctctgataagtctttctcctttgctatcttaagatatttcaatcctattggtgctcatccatctggtgtcatcggtgaagaccctttgggtattccaaataacttgttaccattcatggctcaagttgccattggaagaagaccaaagctatacgtctttggtgacgattacgattccgtcgatggtacgccaattagagactatatccacgttgtcgatttggcaaagggtcatctagcagcactaaaatatctggaaaaatacgctggtacttgcagggaatggaatctaggtaccggtcatggtaccactgtgctacaaatgtaccgtgccttctgtgatgctattggtttcaatttcgaatatgttgtcactgctagacgagacggtgatgttttgaacttgaccgctaaatgtgatcgtgcaacaaatgagctagaatggaaaacggaactagacgttaataaggcgtgtgtggatctgtggaagtggactcaagataaccctttcggctatcagattaaaggtgtggactccaaattctttggggataagggagatttttcatccagagttgtatctctaggtaaaggtacctcattcgaagttaaacttgctaaccttggtgctaccatcgttgacattgttgttaacgggtgttctgttgttgcatcgttggataatgaaaccgaatacaaggatcaaagcaatccattcttcggcgctactgtaggcccctatgctaacagaatcgctaatggtaccttcgaaatcaatggtaagaggatacaactaactgtgagcaaagaagatggtaatgtagttcattctggaatcaacagctaccactctaagaaattcttaggtccaatcgttaagaacccggaggctcatatttggactgcagatttcaaatacgtagatgaagaaactgaatttccggccaggttgtccactttggtaagatataaagtcgacagcgaaaagaagactttgactgttgaatacgaatcaaaggtcgcgggccaaggctctacaggtgccaacatcactaaccacacatatttcaacttgaacaaattcaatgaagctactattaagggatctaaagtacaattgatcgacaacaccggtctcgaagtgaataacaagttgctcccaacaggaaacttaaagaaatatacccaagtggctactttcaatgattccccaactgaaatcacagagaaggaacctgtcttagatttctgcttcgtaagcggattacctgctaaactagatacaagatcttctccgctaacaccggtgtttaaactatctaacgaagatgctaagttggaagtggaagtggctaccactgagccaactttccaggtctacaccggtgattacgtcgatgtcaaagataaatacgaaaacagagctggtatttgttgcgaacccggtagatacattgacgctgtcaacaatcctgaatggaaatcgagcgtcgttcttccagcgggagaaacctatggccacaagctttcttatacttttaggactttgtgatggaaatacatttgacatagaaaacactaaaccaaataaaaacttaaacacaataacatgacatgattgttgatatatgagagtatgtttcttgtcaacagttttctttctgaatcaatatatacacatactacatagttttaccttttacgacttatattgcataattaaaccccataataataaacaaataccattgacatgacagataatatttttttatttcccacatgtcgttcctaacacgcagctacatgacagtatcgaacttcgaatgtgatcgcaaaccaacgtgcttgtgaccagctgcatgcaagcaaatgacgatgatgataaaagttgtgtcggacgacaaagcttcagtgtcaccggatttggttcagttattatttttcattggatatggaaacttcggagttgagtggtccgttcccgtctcggatgattgtggtccgatggacaagctgattcgaaggccctttcgttctctttacggcaggttagcaaggccgtaagctcatcgcttgggtatgtccacgagctacactctctgtacggatagtttcttagcaccgtcaacaagattaaggaactgaatggtgtattgtttcattatggtacaggattgcaccggagcactgtatttgtggagctacttgtgctaacagcacgagagtgcccaatttatttcatcaagtaagtttagctgcgaatatataaagtaaagctgtagatggaggatagacttgtcattcgagaattggtttgaattggattcagttgcgaataattcttttaacatacagatatagaaaaccaatcatcaacattgattgatacgagcaaaacagaataacaactaacatcagcgttttcaaacggttaatataatgtcttttgacttaacagatcactcacatgcacgttacaatccattgactgattcttggattttggtatctccacatagagccaagagaccatggttaggtcaacaggagaaacctggtagaaacgatgctccagaccacgacgataaatgctacttatgtcccggtactaccagggctacaggtgagcagaacccagattacgaatctacatatgtcttcactaacggctatccagctgtgaaattagaacaaccagatccagaactgacggtgtcgaattgcgacgcattgaaggagagattgttcaagttgaaaggtgtgaaaggtaactgttatgtgatctgcttctctccaaaacataacctaagtttcccacaaatggctcaaagtgagatcatgaatgttgtcaaaacgtggactaacttattccagactttggagaaagaagccttggaagagaacaagccttataaatatctacaaattttcgaaaataagggtactgctatgggttgctctaatttacatcctcatggtcaggcttggtgtttagattccattccaagcgaacctgcaaaagagtttgaccacttcgagaaatatgaacatcaacatggtgctcacttgttggaagattatgtcaatttagaacttcgcgaaaaggaaagaattgtgtgcgaaaatgattctttcttggttgttgttccatattgggccgtttggccattcgaaaccatggtcctctcaaaacgtcgcatcccatccttgaatcaatttactgataaagaaagggaagatttagcatctatcatcagaaacttgaccatcagatatgacaatctcttcgaaacgagtttcccatactccatgggtcttcaccaagcctctctcaacgctaccgaaggagaattgaaagccgcttggttccatatgcatttctatccaccattgctaagatcggccactgtgagaaagttcttagtagggttcgagttattaggacaaccacaaagagatttgactgctgaacaagcagcagatagactcaaagccctaagtggtgaagtacattatttagcaaaacttgagcaggaagaaagcaaaacttgagcaggcaaagcagaaaatatccgtataggaaaacttatttacaagttatactcacataaaatttccaaacttagtcacattcgtaagcttttagatcctacctaacgttacttaaaattcatattctaatattgaatgctgaacgacaggatcttcgttgtctagaacagaaatgatgtcttctttaatttctggttctggaatggactcactcgaatgatgataaagtatcaacaatgatggcaaggttttgccatatgtgcatgttacaaattgtaccttatcgccagattctgacaacagatcagggaattccttttctatacccttaatggcgactttcttggctatgacatcatgtggataagagtcttttgtgttctctaaaagcaccaatgccatacttgctgcaacagaatctttaccatttaacttaacatattttgtgagtgcgcccagagccaaagctagcttaccagttctcaaatggaattcaaattccagcaaatgtcttctcgtatcatcagtggtttgggataaatatagtttcaaaaattgattctcgaataattccaaaggatttggatcattgagtaaagtttcaccaaatggatccttgtcatcaaggtaggcaagatacttggccttttcttcttccttctttttattcaaagcagcagcttcttttttggcctttttgttggtcttcttcttgatagaactgtcatcatgctcttgttcaactgatgcagttagttgcaaagaatcaaatcttccgaaaattatccttgaagcaccttccatagccctaataaacataggcaaagtatagaggtggtttccccattcaagcatattcacgtaggctcttggtgtcccttttctcatacaataggagtggaaatctaattgatcatcctcaaattgcttgtaaatcttaggaattgccatataacgttttaaagaaaggccctcaaacttattaacattgaattccaattcttttagaagttttccatgagattctatctcatcaacggtaagtgcagttatatctttattcttcaagccgattaattccttgcaagattttttatacaatctgaagaagctctcagcttgttcgataatgaaccaagaggcttctaggaggtgtaaatctggtacaccatttggagattggtcgtttttggtaaacaatgacacgatcttagtagcctcatcaattttatcagctcttaacatgtattttacagtctttgcattaataaatctatcttgcaggtcaagttcgcgacctttatcaataacttctgaagcttcttccaatagccccaaatgcttcaggactctggacttgagaatatatacctcaacaagagttggagtgtggttcattgctttgtcagcatatgcattagcctgctcgaactgctttctatgcaaataatgtagagccaaaaagtaagttgtccaaacaaattggattggttgatcagtcgatgatagctcagcataataaggtaatacaatactttcaacaatatccggaataccttccttcttgtaaagaggtttgatgttattgaatgtggctggaacaccgcgatttaactgcgttatgatataatcattgagtttcgcggttaattctaccttatctttgaggaatgtgagcggaatgaatttaggaggctccgatttagggtaaaatatagccaacttttcatataaagctttcctcaacttctcatttccttgaattccaagtgaaacttccaatagcctgtaatatctgaaattgtctggacttctcttaatcaaagttctgtacacaatagaggcttccttagaccgaccaagtttcattaaaatagaagctttcctctctaaccagccatatctatcataaacatcgtcggaaatcttttccaaatgctctaaaactctttccaaggattctttatcgttgcctgccttcttgtacaaaagatcattcttgtacatgatacattcgttgttctcatacatttctggttcacccaacttgccttcagcaagctcttcaaatgtcgaaagagtattgattgcgtcttgcgtacgcccattcaaatcttgtgctatggccaatgaggtccaattggcacgatatcctctgtagttttcccagtacttttttctcgattccagcgcgcctttgaaatcatgaatttgagattgcaatgtcgccaaatctctatagatttgagtgtttgtagaaccattttctaatgcggccttgaaccactttacagcgtctgagtaatttttcacctgtctgtaataaattcctaataagtgtccaccaattggacttacaagagtgcctttaattttggataacgctttatcaatgtaactagcagcttcttcaggtgtactacagaattgcaagttcaatcccttcaaaattatagagtccacatgactgctgttcttcttcaagattgtgtccaagatcttcaacgacttcttgtaatttttaccttcatatagttgcagtgcttccaacatattgctgtcatccttagacctaccaattggaagtcccactttcccgtgagatagtcccttttttttatacatgctagtgtagatcaatgggtcgctgagtgtagataagcaagccagtaagagtgtttctccatttattcagtcatgaatatgattgttgaacttgataattttcatgatttagacgttgactattgtaaatttttcagtttagagatacattgaaaatgaaatgtttgggtttgaacgaactgaaggtaatagttagcaagcggagctggtacgattcaaggagtttattactcacctactgcaataaagttaaaacatgttgcaatccaatgatacttttgatatagttacatactcacatttacaaatattttacgtaattaaagggaaacagctgacacttttgaaacgtagggtttctaacgagttaatgtaaagatcaaaaacggaagtcaggctcttcttccactttctgttttttatgtaagacattatcatcgtccttctcctctacgcttgttgatcgtttgttcgtaatattgtaagaggtagtggaactgattattgtagatccgtcgacttcgtttgatttagcttccgttagaacagtaaataagggtctattttcatcatagtgctggttgactacagagcctccatcaattggcactaagcctgaattattgttttcatgtgtctcgctttctgtttttgttgcttccgcttcattggcgtctgaagacacctcatcgtcggaaattgattcgttcaacggatctggatcaatatgtgcgtcttgatcttctaattcttcaaatgagaacatggctccgaataagttttgtttgggtattctcaaagtatcttcagggtagtatccgtattgtgtaccggtaagattagagatttcccaatttattccacagactttcataccagggtatgatttgggtagtcctaatctattcatttcatgacaccaaggcgggagcatcccctccgtgagatttaatgcctcccttaaagtttccgatagataccctggtctatatcgtgtctttatttgtttccattcgagttcactatccaaacttctgttttcataatataaatcaccaaatgacaatagttcaggtttccaattctttcccaaagtgaaaaatgcttcgtacaaccttttataatctagatctaatacacctagcttgggttgaacttttgctctggtaatatccttcaatttctctgcttgcttttcgtttccagagggaacagtctctcgcatcgtttcaatatcggtttgtctaataatctcaggtaattgaaatggcttcctttccatcattgatcgtccagataaataacctcttttcatttgccaatgtctggggatccccactgtattatgtgttgtctttatagctgcattgaaataaggccattgcgcatcgcagtcaaaccattcgatgagttccggatatggtactgaagctttcaaaacagcaatacttggtttgttagcaagtctcttttgtctttctgatatattttgaagtacttcatccgcttgatcctcaaaactgtcggaaccctcagcatcctcatcgtcaatatcagcccgttcttttcgtactatggcttgttcccgttttgaatcatcatcctcatcggcccctgtagccgaagctttaaatctttgtaacactttattgagactttcatccttgataactaaaggttcattaattacctgttgcgaggtgttgccattctctgatgacacttgttgtaacaaactggaaagcctcttcttcctttcttctgcatcctctttcacagatccatttttattctttgaacggcgtttattagccttggctttctttaccatagtgcaatatctggtgggcagttgactgttgttatattaataagcagtcgagccagaatactattgtatgctcatctgtcaatttgccttttttatgtcctttattaagaccacatatatttttcaattaaatgttgaaatttataccattatattatacgtgaacagatatggcaacattcaacggtcttgtatacatgtgatagatgctatatgactatggataataacgaatcactcttctaaattcttgagtctatcgttgattgaatcggcgaatttgttaaattgtacatcatcgtcattcactttccgcagtaagtcctgtaacttttgctgaatatctgaggctatctcaaacacggtgggaacatcttcgttggaattaccactattttctgatccttttggttcaggggtaacaattggttgtgtcgaaatcatcttttgaagtgatgactgcatgtatatggctgtatgtaagctagatcaatagacttcaaggtatgtcggttctatgacatttacattttttttagttatttgaatccgatccaaattttggtgatacaaatgatacatggaggtgatgagactaacaatggcgagaacgccagctggtctattttgtccatgatagcctattaggtatacagatgagttggaaaggggtttttgcaagttcatttcccaaagatactttacagaagtatattgctgccaatgagagcatcgccaactctaccgtttttcaaggtacgctatatgagctcacggtggtacgagaattaatgaataagctccgactggaggatatgcaggtagttggcggttcatatgatggcggcattgatattcggggcaaatggaacgttttaccattaacaaaggctatagaaatgcaaatacaattcgatgagctacctaaacgtttgaaacttccgactacatcgataaaaccatggaaacatagggtgaaacccgataaatatttagactgttacattcaatgtaaggctttcaattcagataaagttactggccgccaggtacgggaattaattggatcattctccatgcaagttcccgctcgtaaaagaaactcgagcataatgataatgagctctccaactttgtttacaaaagatggaataaggctgtttaatgaggccgcaataccaatggtatttaccaaagtggatatgatccagagattagctgatggaagcttcgatgtgaaaaactcgggaaaactacagcattattatgagaatgactatgcatcgaaattacttgcaaattgtggaatcaaagaatggttaaaattgaaaggttatgagtccttagcacaaaaatgaaatattagcacgcaattacgctatcagaaaagtttaaatagaatgaaacctgtacatatgatgaatgtaataaatatgatatgctaattaatttaaagatgtataaatttataaaggttgtgtatctgattatgcagcgcatgaaaacgagataggaatgtatatagtagccaggttaaaattatgtattaatgatgtctcgatgttgaagggaaggcgtaagttttaaaacaagtttgggaatagttgtggatggcattttagaatctcttcatattgaagcccactgctaatgtcttggaaatcatataacatatagcagagacaaatgacgtgacaccgcaccaaattacatagtggtcatagcccttgaaactcttttctggtccgatgatggcacctgtaataggaactgctactaaagtaccaaatgcgacaacaaagtacattgtagaatatcttcttccgaattcttcagtctttgagatttgtccacagcagacaggtaagatactgaagatacttccggaagaaaatccataaatggcactgaatgcgaataacaccgctctggtagtggcaaaaggtaaccacatcacaaaagttattatgccaagaaacactagcgtaatcattgcaacgttaaaccttccgaagatatcactgaagaatcctggtaaccatctccctggtataccggcaaggttaactaccatgaccaatagataactatcagattgcgatagaccttgtttcattgcatatgaggtgaagtaggtgataccagagattatgctaatttcaccaaacacagttcccatgacacagaaagtgtacttcaaatctttgaaaccgaagatatcaaaactttgcaagatgtaagtgttgaaaacacgcctccaagtaggtattgctctttcacgttcatttaactttttatgtggcaatctctcctttgctaagactaaagcgacaatcaataggaacaaattaacaaatcctaaagttctaaggccccatacgaaaccataaaatgggtccgagtccttctccattgcaaagaactttcttagaataacagggaaaatgacaccaccgatggaaccgccagtggtagctattgcagttgcggtaccacgcttaaccaggaagtaatgagaaggcacactgatcaatggactcattagaataccattaccaagtccggtaacgattgaaaaggacaagatgaactgccagagttcagtagaattagccataccaaagagcccaccaacatgcagtacagaaccaacaatcaatgggcccttggcaccgtttctgtcaaaataagttcctgaaaagatgcaacttgcgaaattaacaaacgaaaaaatggagaaaatccaacctacggtagatgatgaggtactcgacaactggtttctttcaataaagttttccatgacaccaatagtgttcaacataccgaaaactggaataaacccgcaaaaacaaccgaatatcaccaaccatgcggcaaacccaccttccggataaaacaatccgtcatcctgaatgaagctgggtctctttacgccagactcaacaggcctcgtttgctcgttataagtttgagtagcctcaagatcagcgaacttgttatcaacgtccacttcttttctcatcaatagctgccgggacgattgaggagacagcatagctggtctagaaatcttttcaatagtcacttcttcggacattttttcctcaatgggtagagtatacaccttatgccttgaattctgattagcagtgctagcatggtggcctcttgagtatgtctgagagagttacaactctctctctgtagcactcattgctcatcgctttatatgtcaaacatcgaatttttcgaacggcgttcgatatccgcttttcctttacgaggaaagagtcacactgggaccaagatattacataacagtaaacattgcaccgggctgaaagttgatgctgacattgaattgaacactaaagtgcaatgcccgcaatgcccaatttacggtacgatcgacaagataaatttgtaagttgctccctttaaacctggtttacaaggatcctcactaacgtgacgaaactttctacaagccggtagaacgctcgtttgactgcatttgagtccacataaagcagaaattgtatacataaataccaaataatacattactcacgtgtaaaaaaccactatcagggccctaaatgccgggactggcaacctatattgttcgttttcccacaggaatctcgaaatctcaaaatttttttcatcccattgaagatggaaaagaaaaatctctaaacttggatctttgaaaagataaagccttagaggagaaaccttgactgtttgtttcatttaacaaaatagaattgatttgggtgttttccgtttttcactggctcggagtttcggagaattaaggctgagtcttgattgctaacaattatagagtcaatttgttttattcttttgaagtaggtccaggatcgaacttgtataaatcagatagcctttcgttagatacttgagtcatctgtcgaagagagaagcatcaacatcaaaacagtgaggaagcacaagagctaaggaactagaagttcaaggaaggaaacaatgtcatcccagccagttgaattgaagaagaagccaatttcattctccaacattttgttgggagccggtttgaatatgtgtgaagtgactactttaggtcagccattagaagtggtcaagaccactatggcagctaatagacaattcacgtttttccaagccattaatcacatttggtctcgtggtggtgtatttgggttctaccaagggttgattccatgggcatggattgaagcatctactaagggtgctgtgctattgttcgtatctgcagaagctgaatatcactttaagaaattgggattgaacaatttcggtgctggtatcatgggtggtgtttctggtggtgtagcacaagcatatttgacaatgggtttctgtacttgtatgaagactgttgaaattaccaagcacaagagtgctgctgcaggtgctaagcaatcatcttgggctgccttcaaggaaatttacaacaaggaaggtatcaggggtattaacaagggtgtcaatgctgttgccatcagacaaatgaccaactggggttctcgtttcggtttctctagattggtcgaagaaggtttgagaaaattcactggtaagactaatccagatgataaattaactgcattggaaaagatcttcgcttccgccatcggtggtggtttgtctgcttggaaccaacctatcgaagttatcagagttgagatgcaatctaagaccaatgatccaaacaggccaaaggatttaactgtgggcaaagccttcagatacatttaccaatctaacggtgttaagggtctataccgtggggtcactccaagaattggtttaggtatctggcaaaccgtgtttatggttggttgtggtgacattgcaagagaatttgtcggcaagttgaccggtgaaactccagttgctaagcattaagaaatgtcaaaaaacaaacaaacaaacagaaaacactgtgagataaatcataaacaataataccttagtcttccgcgtcactttgctcataactcataattcataataagatttacatacttagcaagtataatattccccgctgtactcatatttaaaaaaattgatccagtatgttggctatacttttttttgattgagaagtatcgggttgatctgatctgaatcttaactagcggaaactggtcttcatatcgtagcttaataaaaccacgtcaatatatactgtggaaatgatgctcaagttttccagtaaacggcgcgtaatatcagtatttcaattgtatattctaaataacgagtaactactattttacactggaggttccaaataatgattaaactagaaggtttgaggatgaatgttttaagtgaaagaataaatgcatgcaataacaaaaggaattgaaaatgtcgttgttttaatatagtcgcttgagaacatcgtcaaacaggtatgcttataatacagtagtgaaaaaaaaagaagtgcctatagtgaacagtttacttttttgttcccccacttgtcatatccgtacaatccactgatcgttaaaatcaatccgaatagttgattgatcgacaaattcgattcccaaatgaacgctactccgatgatcacgatccgtttcatgatgtttgcaatcgaataagtaacgggacttagcataccgattagttggaatgctaacatggcttggaagaaatgagcaaccccgtgaattagaactagtgtcattacgctcggcgacaaatcagcgaaaactgaggtagagctggaaaaaacttcgttcgatacgaagattgggaaagttaaaataaaaccgacacatgagcaatagaataaaatggtaattttgtccaactggatcggtgagtctttctgggactttagctctactagattcagttgtgatttgttcttacagggtagaacatcttttgacttaactgtcaaaattcctttggcaaaaatgttttgtgatacaaagatcaccatagaaataaaagcaaacgatagacccattgagaaagttgttttatcagtctccgtaagtttgcttttattgttttgggatgtccaacacgtaatgataacaccaaggatcaaaggaataagggtatagtaagtcatattgttatattgtcttccttttgcgaatctataatagcacacggtcgcgattggagataaagctttaacagaatgcaccaaggaaactggaatcaaagatgtggatttatgagaggtaatatgccctacaaattggaaaatacccattgggaaagttgtataccatatgactttagatggtaccaggaaagtgtttaatatgcatctcgaaaatgatccattcaaataagtgggtagaattccttccgggaagtttagaactgtattcttcaattttgatgaagatacctgtggtgcatgcaaatagttagcaaacgttacaaacgcgagacatagcgatgcgcttagaaggaactgcaattccgttaaaccaacaggatgtggaaatcgggataaaatggcttttgacaggtttgatgaaacagaagaagtcatataccatataaggcataaaatagatatgtgaacattcacttccggtaaatactcttgtacatccttgggaaatagattgacaaattgctctttccacgtctgattttgcagtcttctgacctcattgaacgaagttgaatgtttatgagacctgtaattttcctggaacggtatttgtacctggttgacaaagttaacatctgaaaatgttttattgatcgaaggacggcgcttcgaagtgacgctcttggaagttacaatcatttttcgcttattttattcacaccttcttaaaatcaataaagcgagtggaacgaagttgaatgagaataatttagcaaacgatagaatagatcgaaaagaactgttactttatggagcgagcagcgattttagagccgactgtcactatgtaagaagtatctctttctattacaagtcgccaaaaattgatgccatgttattatattatatatttccagtcttttttctttctttctgaccgatgtgatgtttttgcttgctgacgttgttaacgttttttggcagtcacgtggaaagccaagcacaaagggttctctgcagaatggtgctagctcgtgattgctgtgggcagagcaagacaattttctaggaagcgtcaattcaaaatgccataggttttaactctaattactttgaataagtgtgatatgtaaggttctatagtcccaagtatgagtctctttccaattgtttctttctgtccgccattttcttccgttgtctttccaaagtcttcttactggattttgtcccatgccatgcttgagaaagttgtttataggcctctttagttttcaactcattaccctcggaatcctgatatgcgagttcgaccgttgggttgtagtctcttagtttttcctcttgtatacgttgaattttcaatgccatttcttccgcttgcgcagctttaatcttacgcaattcgtcctcagaaaagtttacatcattggagtccaacttttcgtcaacagtcttaagggaattcacaatgccgtttaagatctcaaactctttcctgacatccgttccgtgttttttactgtcgcttcccatattggggcgatcgtcttgcttaattatatttcgttccttcaagaagttcaacattcctgccacacctcctgagaaatcaggttgcgtgatatcgttatcggtgactaatgttgctggaatagttcccgttttatctttttgcactggtttcaaatcgatttttatgggcaaatcatcattaacaggttctctgtcaagaacgttcgccttcaaagaatccaaaaattcatcggtttcatccagaagaattcctttatcactattgttcaacatatgaattcctttgcttctttgctgtccttcgagtttttccaactccaatgaattctttatccctgttatttcctcattactgcgtttctgtttgactttgacaactgcctgaattggccggtctgagaaatcctcatcatcttccaaaagatcaactttcaccattctcgctgtgtctattcttctcggtttctggttttgatttgatttcttctttcgccttttaatcttgactggtgcgtaatcttgatatggttgctcatcatctgagtcactttcaattttgaccctcttagggagagactggtgaacaggtaatggtttatcatttactaaggagtcgtgtaatggtatgtcagatcttgagtttgtatcattagcctcatcgctgtaatcaaagatggagattttgtttagttttctatctttattcaattgccgtagcttaagatttttggcatcctgtttatcatgaactagcttctcattctctaatatgttttcgtcatcaatattctcttcgtcgtttgtcactgaagtttctttcaatgtaaaaatgactgctttctgttcagcaatagatttcagttcatctgatactgggatatggtgatgcgtaatgtcatcatgtacagtagcattttcagcagaagattctttgtgagtgataggtttcccaattttggaaagccagtcatcaatagattctttatcagtagtcgctctttggtccactgcttcctttgattcatatattctttgttttagttgaccaatctttttatcacgatcttgagcgcttccatttatttttccagaagcacaatccttttcggagggacgtgaacttagctgactagatcttcgtactttcctatttgtatcagatgcaccttcttttgattctgttgacgtctcagtgggcctaggtatagtcttcaaacctaaacttgccctaattcgatttgtttcttccaaagatatagaagtaatcttacccatggctttgaagtaactgtatgcctcgtagaattcgtattgtggtcgaatatccttattatcaaatcctgttgctttctttctgcctcatctcatcgccaacttgtccgaatttaagaattgtatatttcaacattttcatcagtgaatattttgatgtaactatcaaagccattgacgatgacaatgagaagaagagtacagcgtatgacaataattcaattattatattttgtttgaatttgatacagactaatttacagaggtacacacatagtatgttcgtatgtaatggaacagatttatacgaggttattagagatttaatgcaaaagagtggggttttaatgtgaatactatatctatttcttttccttcttagatttcttatcctttttttctttcttttccttcttttccttcttttccttcttgtctttcttctccttcttagacttcttagattccttagactcttcatcatcgtctctctttctcttcttatccttcttatccttcttagatttcttttcttccttggtttcttcctcgtcctcggattcatcatcagagtcagcaggagcagcagctgaagacacggtgtcagcatctgcgttgtatgctctagcctctgtgatttcagtcttcttgtgctcacggacgacctttggtgtggttctcaagtctctgccttctaattgggacaatcttgattctaccttagctctggattccaaaccgatgtcaccagaatcgtctctatcttcagccaaagcatcgtaacgcaaagaaacggcagccttagcagccaaaactctggcaatcttacccttgttcttaccagatgcttggccaaccaaggaagcgtggtacaatagaccatatttaggagtgtcatgcttagttttcaatgctctgaaaagagccttttcagcacccaagatttggatggtggaagctggagacttggccaaagagattaaagaaccagagtgtgcgatcaatctagcaccaaccaattcaccaactaattgagtcaaatttggagcaatagccttcattcttgaagacaaatagttagaaagttgttctctgtaggcagcaaattcaacaatttgttcggctaaacacttgatattaatcaaatcaactggggtaatttcagtacccatggagacttcggcagcggtcttgactctctcttcaatttcttcaggcaaaatttcagacatgtcagtttcagcagcattaactctaatacccatggtcaagattattctggcgtaagcaacagaatcagtaacaatcttggccaattctgggaaatgccaaccgtaccattccttacatctcatagcgtaagtgtttaattctttatctagatcgtctagcaaagcaatagcttggatgatcataacatcaactttatcagcagagaacttcaatttgtgacgaccgatggagtgagccaaacccaatgacatcttggaaagatcttgatcgttcaaacctggcaaaagttctggcaagtactccttgactgcacggtaaatatctaaggtgacggcatcagagacaacgttgaagttcaaacccaacttgttgatagcgtttgccaatttagtttcagaaacaactaaggtggcctttttgtcggtcttgcattcttccaacagtttttccaattgggaagagactttaccatcaatcacagagttagcttcttccaaagcatttgcagctgatgaaaatttagagaaagcagcaatcttgaattggttcaagaccttgtcactgctgttcaaatcctgaatcaaagaagaggacttatagatcttcttgtcagatgctttcaaaagagcatacccagctgaggtttctgtcaagacgtaggccatcgctaaaaagtcttttatgtgtatgttgctagatgatcctaattattcaacgggttctttgagatatcgtagatatgatggatgtgcttaattcttcaatcgaaacgttaataccattctgtagttcaatactgatgagatgagcttgtcgaaaatttttcaatgttagttaaatttcaaaaagaaatgaaaagaaaacacatctggacaccacatatataaatcacgtgttataaagggaccagataaagaactgcactgtttgttcttcatatatcgagaccaagcacattccaatggccaatacggttcacaaaagcatcaaactagacgttgtatattaaacaatatttgctggtagtttttaatttattcaagtctatacataaggtgagatgtagaatatatgtgccaaatcaattgacttgtatacaaaaaatgtaggtgtgaaatgtgatcattaactgtcatttcctcccgtctatcttaagttctccggttatagtcaaatattcaaagggattgaatttcatatgcgatcattgaaagtggtacatcatcagtgaggaaggttttgataaaagcctgctcagtgtaaaggtaagaggagggaacacgaaaagtaaaatacaaactaggtaatggtaaatggtgcctctacgcaccgctctcctcaattcttgaaaatgcggatgacagctgtcatgaaaatggcggatagaactggaatagtgaagttatcatcccagttaaacaagtcgataccttcactcaaagctgcgacaaaaccacctaatagcgaaagttgtagtaggtttagtttgcttgtctcttcggtccaggagatttcacctggtttgttcacccagttataatgaggcacaaagaatccgtaaaatgagtaacaagttatgagaccaacggaaaaggctgcaatggaacctgctaaagacttatttctggccaattttggtgtaaggtgtccgtactttctaccgaaagtagacgcagcggtatctgaccaacttagtaagaacagtgagattaacgcgatatctttactaaaaaaggagaacgcaaaagtcaggcccaataagtaccataggactccattatacgtatgaatttcttttttcctcatcaatgccccaacacaacgacaatacattttattgaagaatggagaacgtagacgaatgaagtctaaaataaatacgacagtaaatcctactatcaatggaaatttcactttcttgtaatcaacattttgagtgtaaagatatagggtaataaaaccaatagatgaatggaatagtttccgtggtatttcgtgttttgtaatgaaatcaccaaaccattcatgtgactttaaatgaatttctgttaatggtagatgaacatcactcagactctttcccaagacaactgtttccttctgtttctttgtatttactccgttaggagtactcagtctctgttttaactcggcttcgttgccagaatcatttgaattgtagtcaaccatctattcaaaatagtaaaatgctaggatgttcttctctattggatctcgtcgatttcttttggaatttctgacttcagttcgtatcggaagtgtttcgtatggtggtcaagttccagatcaataatcagaacacaataacgataaccggacaaaccttagtaagacagtagaaactaatgtttaccagtttagttgcagttttgagcacaagttacctattatagatcagttgaagaaaacttgcatcatgatcaatgagttgaaacactgacctcatcaaccgattgcttctttcattaaaatgtttgaatcatttatcgcagattatttatttatcactcgaaaaatcaattcacaagtgaagaagtcacatggcaagtaaacgctatatgttacccgcactaaaatcatcataacatcatttcgtcagaggttccttatggacccactaatcaatgtacagcatcactgtattagtaggaacttctatacttactgtgtatgtatgaaaacaaaatgatggattcttattacttccctataattgacaaattactggtttatacaataaagaaagatatcgtaaatacaaatatactttagtacccagcagtttagtagaaagtggttggtctcttgtaagcgaaaaccttggtagatttttgaactctgtgaggcaatgggaacttcaagtccttggtcaagaattgcttaacgtattgtctcttaacgtcagcagtcttttccaattcgacgacctttaggatgtggatagatctaaatctagctctgtgtctggcagccatgtcttggtacaaagattcgacggcaccaactctggtaacatctctgatttccttgtacatgttgtgagtaccagatctagagtcgtatctaacccagacaccgaagttcttaacggtagttgggtgagcttcgctgataacgtttagagaaacgatttcaccggaagccttcttgaccttgtgcaacttttgcaagaagtaccagtaacgagacttggcaacaacgtcgtttggtgcgaagattctcattctgaacaactttggttcaggaacggattcagtaggtaaacgacgaccgataacttggtattccttgaaagccactattaaaaaataacaataaaatattgttagaacattgttagtaaattaagttcgttgatcatgcggaaaacgtatcattcttgttgaaggagtgataagttttctaatcctcaaatcagatagagttgtcgtgtttggaaagaagtctgagttcaatcaaccaacccttagaagttcgttacgtcccgtttctcaattatgttgtatttcatagccacgctcgcgtgtatgaccgaaatcgggccatatcgtaatgctctttatagaatatatgatttgatgcccgatgttggtttggcccattcgtcttaagtcttcagtatttatgtcttcatcaggccgtttacaacttcaagtgtattaacttctctgaataaactgtaggtttaataacaggcatggttcaccattttctttcgaatgctttcaatcaatacgttattgattacccattattttccattcatattttcattgttgttcatcatattcaaaaactcatgattctctcttgattattctcccatgtacttgtgacgttaactatcgactcgaggatactcttcaagtgttgctgtactcactttttgacggatactgctcttggtggttctgctcttggtggttctgctctttagtgctataacctattaaccaatactatgtgttgaaagttcaatgaaatttctgtatacaattatttgatactttccactaagctgaaagtgctcattgacactctcacccaaacacagagcaggagctaccagagtgatttccagaattggcatccagcacagcgtgcatgagacaaacacaatatccagcccgtagctaggcagaggttagggaagagacgacaccaaagttggtgagagaatagagagggaaaaggatgatcgtgggccagcggcgggaagttagagagaaggagccatgaccccagagggaggaacaatggggggggcttggcccagtgccgctcgctcgagggcaaggcctccctaacacagtcacggtagtacaccacaggcttcccaagttagaaaaataaaaaatgtattcctagttgagtatgttttaagatctattaaaaaaaacaaaatactatactcaaaatgtacggatgtaaacagtcccaatgaatacaatgctgtaggacctcttttcggctgacatcaccctggtttaaggtacatgcagaaattaggcaagaagcatataccctgttaaattaaagagtgagaacaataccaaaacaaaatatccgttaatgtgattagacaatcaaagaaaaaagagagaatatcaaggagttataattcaatattctctcctgcttcatgatcttcaatgcatacatcattccagatacacatcgattcataaacgagtgatgatgataataataataatacttaaaataatctatatatatttattatataagagcaaagtgaagaaaaaaaggacgaacataacatctggactatcaaacagttgagacaacggtgaaaaatatccattggcggtcaatttcctataatgtcattcatcaatttgcttctatcggttcagcatgttgaatctctaaagaaggaacttgttggtcgtttgcttgttctgctacaataccattctcctgttgttcactctctgtaggttcttcagtaatggcagctgcagccgtaacttcatcattggaagtagttcctttttttttgaaacctggaatagaagctaaaggggaaaaagattttatgtaatcaatggtttcctgattcaattcttggaaagaatccttggtggctacccaactttttggcaaagataaatcctcctggttgtccaaatttacgttcaagacatcgttaacatgtttaacgtaattgcatggagccaaaatagtctccttagatcttttattgaaaacagaagcagctctttgaatagcattgaaagttaaggcaaatgacctatccaattcattagagaatccatttgtaggaacttctttaccctcagggaaagaagaattgattaaagattcgtaccatttgttacaaggagaaacaagtggatccaacgaacctctaattaatggctttccgtgagtgtcatagactttttcattgtagtattgtctaaactttaaaatttggttatgggtcggttcataaatgtaattctcagcaaaagacacagttgtgtcaacagttttattcacagccttacttgttagattatatgggatcatagcctcttctccgagtctctgataagtcttggttttcaaactaggaattaccttttctgttacagttaatccagtgtcagcgacagtatccacaatcttagttacaggttccacaaacttgacaggtttggaggtcaaaattgctgtagcagttggtaatgtattagcctttacaactctggcaacagagataccatccaatatttctttagtttgctggactaaaggatatccattgatatgatcaacggtcttgtacgacgtaatttgattttccactggattttgggattcttctgtattttggttatcttcatgtggctgaactgtggtttgttcttcaccagttggttggttgtgtttcttcctgaaaattgacattgcaagatagtattaaagcgctatagttgttgatattttagtgattgtattaagcaatgatagttttgtactagtaataaccaaaatgcagatgagaaatctcttaatggaagcagataagacacagaaatgataagtatggaaagacaacttctcaatattagagatactttattcgccatttatatatttttatttttatgtgtcgatcatggtgtcttgtgtcagttctatcacaatacaataataaattgtttttgtgtctgtttctcacagcaataaggaaacaaagagcacagtacagtatccttctggattttatttcaaacagccgcaattatatctgaatgtcatccctattttgttgatagcacctcggattgccactgacgcgcgtcaaaaaaaaaagcattatcgctctgtcacaaaatgtagtgctttatgtaaaagtcacatgtggtatgctgtactactaaaacggcctacagaaatgactactgggaactagagaagactgtgtaatggtatttgatcatccagatgctaatggatcggtctatctatcaactatttgcgaagctagcttcggatttatgatattatacccatattctccaccgaaaatcagaagaatctgcggctggacgtttgaaaaaacatacaaacggatatcaatacctgttgagatgtgtcaaccgatattaagcgagtcggaaaaggaaaccatagtgatcgttatagtattcggacagtaaaaaaatgagtctagccattctgccatgctattaaatgtttcatggaacattttctgttaagacgttaattcacccgaaacgataatcatgccattatattccgacagattccgtgaacacatgtattctgacacggagtggacaaaaaaaaatgaaataaaatataacggtgatcatgtaactcatgcttattcctgtttatgcaaacaatcagtactattatctcttgtttttgttcatttctggtaaattaccagagccgctattaaaaattactgcaaagtgcgttgcaacgggaagtaatctatttttaagtaaagccgaagctcataacgggccattagaccctgtggtgggaacccgatgaaagggtcgagaagaaactccaacttatcacgtgaagcgcaaatcaaaaaaaaccgttatgatttcctctttcgacaggtattaacatgagcaaaaaaggatctaaatcctagataaagaaataaatgctaacaaatgcttcaacaaatctgcagtcttgatttcctataaaggtaaaatgtaaacaagcgatagtaacgtcgaacaataagatcggaaaaagagcatttaagggaagaggaaagcaccaaggtcattagaacatttgcaaccaacagtgcgaagatcatactgggtgtcaatcctttccattgaaaaagaaataaagtaccttagttttattccttctagatgccaattcctcggaataatgcaccatcttttttatgatgatccaggagtggattttcctaatgtattaaaaaactgagttgcatactacattaggatatcatcagcgttgttagaggtgcatatgatatacaaatatctttaggaccagtccagctgtacacttatatttacaggattgaccaacatagttgtttacgtcttcaactagatttggtcaagcgctctttttttaacatttaattcctacaaagctatggttcattcgagcatgatcgattcaatcatgcattccgatgtcctacctgaaaatttatactagatttataaatatcttagtttttctttcagttgaccaatcaatatttttacctggattggagtgtgtattccacattcatttcagtatttttacccacttaaaaaattgaagggacaatcatatgtaactcaggttactgaaaatctgaaacaggctttccttccatataagttgtgtttactccaacagatcggattgattctattattccgccttacctacttattgccaacacttttagttttaccattttcgaatgttattgtttttcaaaaacatttcttttctgtatttcctccttctcactgcgggaaattaatgaggaatacttgtatttttttagtctcatgcaattcaaatactgcagataaagccgtggcggttcaactctttttgataaaatcacttcagatccttttctttaagctcaaggaattgaccattgaaacagttattctatcgttgtttctacgtgtgatgatccggatgtgtaaacaataatttctgtgtagctgaagtgtttgttgtccttttcagtcttaatatgtgcgtttgtttactttcttgaagatcttcatacgtatatacatgcatgaaagttttcatgatttctcgagacaagattgattatccacttcttagataggtggggtatatgactcttgtctctttatttattacaaataccatcttagaaggcgaatagcctattcgccccatcccaagttattcttctttcattagccacgtatcgtttcttcgtttattattccgttccattctgttttatcttttgatattactaccccggatcaatttccattttccaacagcgtacaaattgtcattatagttggaataactgaatgaagcaagaaatgttgcaaaccccttgtactcccaagcataacattactcgagtggacaatactttgccctttaatggacctagattcggctctaaaccgaaatttcagttcccaccgcagaatacgaattccgaaagtccttgtaaatcacatttcgaaatgatgcgaagtcaacaactactggcaaaccaattggactctaaatataaatccaaagatggtctgaggctttcacctcatatttcaatcccattaatacggactgaggacggggacattgaagacgacgattatgatttcaatggtgatgttgaagatgaactcgagagttgtgaagatgatagtgtagcaagcagtatactctcatcactttcagatattgagtcaccaacaccctcttcctctcctgtatttgatgatacatctttcaggaacgcgttgaaaccaaatgcgatgaagaatgtagttgatccagcgacagtggcaatgtttacattaccacttccaacaaaaataaagtttaaaccaaataaagcactaaagccactcgcatctattcttaagagaaccgcaggtttgaactttatcatgaattcgttgaacggaaattataaagacgcaacgatatttgctacagaagttaactcttatttgtctgaaaatgtaccatatccaacctgcactatagaaagagttacgatacccgtgaattcagaaattaagaggaaatacaaacaagatagaaatgaaatgttgggtggttattataactcaagcgatgaagatcaggataatttggtgtacgaaaggaatgatgacactaatgaacaaaattctaagcaagccaacgataaagcttcttctgatgcagctgtgataagagcatatgatttcaattttgaagatagcaccatactcaataagagtgatagggtcactacacatctgggaatttattcccagaatcaactaatgagccgcaaacaaactccttcaacagcaaaaaaagtcagatggtgtgaattcttagaatggtaactgaggacttcacaagacatccccaacagaggcttaagaaacctttcaattcttcccaattcttaaccctcttccgttattctctcctttctgctagtgattaatcaaaatttggttcctttaccatgaccgtcaataatgaaaagtattgtcgaattaacaaaattgctggcaataccaaataatgatatcagtacagaacgaaactaaaggaagataaaaacactacattgtaaaacttaaaaacataaagccaaaaatattctgaaatatctggcgatgtaataatactaaacaattactcagaaagtaataattctacaaacatactaatcaatttctgaagcccaaataaaagtaaaaataataacaaaatagaagtcatgtcaatagaagcttttgattgatcaccctttttgattttccttatgctaattgttcttaaatagttttgtatttgtattcatatttgtgtattcatattacgacaaatttagttcgagatcttcaatagcagaaaatattgacaaacttatgaagtgacgaggaaatgttactattttgtctaactaaactaaagtgattattaagaaatgtgagtgtataaaaagagttcatgaagatgaacaggatagacctgtcgataacagtcaacttgagagacctgaaaaatctgaaaaaatgatagactagaaatagaaaagaggacaattcttgttttaaaattgagaatgttaataatatgatatgattattatgatagtaatgcattagacttgattactgaagtttgccaacgaatgtcttagctccatctgtttctcagagggggaaaaaaggctaaccaaaaaaaaagtatctattgtagacaagtttcactgttgcactgagcattttcgtcaatggtacatccagtcaagtttgtagttgagccatagacaccaccaccggcaattctgctgaatcgacgggcgatatcttcagtgactgcacctgatccaacgaattctggttgtacagtagcagagtgaataccatatctgtggaagatggacctaataacttgggcaatgttcataaattcttcagggttagattgaatttcaacgtggacagatgcgatgtatagggattcggtcaagttccagatatggaagtcatgaactgatacgacacccggtagagataaaatgtcatgcttaacatcgtcagcagaaacgttagatggagtagcctgtaacaagattctagaagccttcagcgataaaggaatagcgcttgagaaaatgatcagagaaatcaataacgacacagcaggatcagtatagaatctccaagagaaatctgtcttccagatgaacaatgccgttgcaatgacaccaacgttacccaacgcatcacctaaaacatgtaaaaagacaccgtgcatgttcatagaacgttgctttgatttcttttgcttcttgaccttggccagagttttgttcaagtgctgttcggttaacaatccagtggattcatcgtcttcgtcgtcgtaagaagaatctacaggagtagatttaggggaaaaagttctttcaacgatagaatgaggcatcatatcttcgatggtctctggttcgtagtcgctaccttcatctaatccattagtctggtgagaatgaccatggctgtgaccatgaccatgttcgttgtcatcatcttcttcttcaccgtgttccaaatccggagcacctccatggctatgaccatgcccatgaccaccgtcactatggaataaagctaacccaataaagttagaaactaaaccgaaacaaccaacgattaacacaagtttagggttggtaatctcttgcggctggaagaatctttgaatagcttcaatcaagatggaaacacaaagagcaattaagaaaacggcgttcactaaagcacctaaaatttcagctcttttccaaccgtaagtgtacttagcatccggattcttattcttggcaacgttaaccgcccataatgcaatgacaagagagataatatcgtttaacatatggaaagaatcagcaatcaaagccaacgaatgaaccatataaccggaaatcaactcgatgaagaaaaaggtagtatcgatgaccaataaggtcactatcctcgcctccttaccacttagcatacttacagtgtttttacttcttgtatgctataacccagtggtcttgtattctgtattacaaccttactaatgtcttttgattgtgtaaccttgaacctggagatagaaacagtataatcctttaatgaaattccaacggctgcaaaaataaagcttattttgtatggaaaagaaaatgacaagagcaccgagaaaaaagacaagaaaatccttgtccgaacaaagagcatagagcactaggtatcagtatagcaagttttcctcatcattttgtttttttatttagacgttctgtcaaaaagaaactttgttctgaaggttaccttacctttatttcagaccaagagcaagagcagtgggcattggtggttttaggctaattcttagtcgaatctatacgatgcaacgccgttgaggaggtggactttacacacaaattagatgaattctatagggcaatgggaaaaagagagtgtgatgaaggaaaaagaaacttccagatgagggacaatacacaaagttggtcaccgagaagttaagctgaaaaggtacctaccggtgccaaaaaaaaaaagcttggtgtcctagacactgaaaaatcgtgctggtgagattatattgagtttctcttggacttaactccatacaattttaatgccactggacagtttaataaagctcaacattcttcttccaatctaagcttcaatctttagtcgatgacttctgtctgcgtggcttttccaatatttttccgatccatcaacatctagtctgtgcccatctagggccacacggaagttcttttcttttgtgacctaatccgggtaaaccaatagaattagcgtatttgtttctcaccagcgttttcttatgaatggaatgtctgggtgtctggaacaactcttttttttctcctgggtattcaagcaaattacataatcgttgggtacaggttacttttttactttgttcggtgtggattatgtaactcgaaaacaatttttctttccgagtcatgttctttctttcttcctttctttcttttcatttgctgtccggcgtcagagctactgacagttgagtcttcgacctgaacatccgatagatattaggtaataaatagctgttaatgcatcagtatgaaccatacagcgttcggtaaaccgcatactacgcccttttagttaaaagaaagaatgacatgagaatgtgtgaattatgttgtgcgcttttatacaatgatcaagcaccatatcttaagttctagaacggatcaaagagtgcactgctaacgaccatcatttggacgaactacttggtttccatgatggcagtgtagtaacgatggaagtctttcctattggaataagagcaatcttgtttcttcttttgagcgtagctgctttgctggagtctcggaaagatatttcatcaattcaaataatccaaagttctagctatctctcgtgtatataaactgtccaaatcatcgatagtaagcttttccagttcacgtttcgaagagtaatattcgataaattgtcctgagatcaacgcaaacagcagtaacacaaatatttattggagtttttcgatatgccaagtgtcaaatttatagttttgctgtgcgttttgccagtgttcttcagccagggctcatgtaaggactcggattcataccataatgtgcattctcttaagcatgccaaggcacagggaaaacaaattgaaggtaaagaagtcgcacatttattccgtagagggggtacttgcaaattccccaacggagacggaatggtagcggtgcaaaccagtgggaaaaatgcgggatgggccatgcataatgaccaagaatgttcatatggatcgtggtgtccatatgcatgtgaatcaggacaattgatgaaccaatgggatcccgaagtcacttcgtatacctacccaggttcccagtacggtggattatactgtgacgacagtggtaacttgcagaaaaagagaagcggtggctactgttacgaaggtaaaggaacagtcgtcgcaaataacaaggcaggttcaggtgttgccttttgtcaaactgtcttaccaggtaatgaagaaatgatgattccaactttagttgatggaggttcccaagaaactttggcagttcctggtactgaatattgggcgggtactgccgctcattactacatcaaccctccaggcactagtgtcagtgatggttgtcaatggggatctacggcaaaggccattggtaactgggcaccttatgtggccggtgctaacatggatgacagcaaaaatacatttgtgaaaatcggttggaatcctgtctacttggaatcaggctcacctttcaagaacacaaagcctagctttggtgtcaaaatcacttgtgatgatgaatctaattgtgaagggttgccttgcagtatcgatccatctaaacaggatgttaatgaagttgaatcgaatgaaaagtctaccggtgacggcgcaactttctgtgtcgtaactgcgaagaacggagccaaagcaaatatcgaagtgttcgaaagcggtagtagcagccagaaaaagagagaacatcacgcccacagggaaaacgtgcagacaacaacagagtataagacagttacagtgaaagtttaaaatggataggtaaagaaatgtctcccaaacatgattatagtttgtccgtcaagtactattcttcattctgataaatgagataacaaaccaaatcccccatgttagaataaaaaaataaaggagtagaaatgtgggcccatcaatgtatttattgccttttctagttgccttcatttccttcttttcaaatagttttcagttcttgttttagttttctaaatgttaacatgtatgtattagtgaaaatgcttaaccgaatattcaataagaagaagttttggcaatatgccgtcagcgattcacgccacgcccttcgaatatatcatagatcattgctaaataaggatatttaaagggtactaatagaagaagtttatatacagttaggaagaattccagttaaagcctaacggaaaacgtcattgttaaaataaatacatgccggaaaacattatcaaatgagttcacaggaagagaaagaattttctataggggtacgtgtttgtacttaaaaggagtgaaaataacttcgcacaaagaaagaaatccctatcggatcatttttgctgttcctccatttctttcaggaatttttccctcttaaaatcgacgactcttttctctttaaaatagcttatccagctagtagcacagtcttgttcaaactttgcctcttcggcagagcacgacgccttgatagccttctgatgctttggatcaagtgcgttaacaacactaatcttatctagacatccgaagaacaaatctctagactcccagcattgtttcctagacgatcttgaaggtgcctttgtaggatcatccatttccttttgcttgctaaaccaacccattttctcgctgtttattcgtatctaaaactccgttgctgttttaatgtgacaagaaaactcactgacgatagataagtagttcgtaatgcaaagatttgcaacttttccttaacaattatctgaattctaacttacagagttacagaaattcacatttcagtgtttcgatattgttggatgcagcgaaaaggaaaattaagtctagatcacgtgctttggatcagacacaaaatagccttacgactgaggtaatgtgatgaaattgaactgctagaggtttggcttgttttgaaaatccgaccccataagaagtttagtctagtgagcaacctgtcactatcagataagatgatactcatttctgaggtccaattgactttacttttgtgaatcaggagcgtgtttattagggaaatcgaaatacttcaatgtttaaattcagattacttttttttttatttatataaggaagctccacattgtagatcgacaacgtagccaaaacttcaaattagagatgggaaacacacactcatagcgcctataagaccattgctaaacgctaccagcactctgaaataggttacattattttgtgactttaaattttctgttctgttagaattatattaggaataaaggcggtaagtgtttagttcctttttttgctgagagtattctctttcggttgatagattttgcaatgagtttggaatgggaagacactgcttttgatatggcttcattgtccttcatttctgatctgaaccagagtaaattgaaacgagtcattgttgccaatgctttacagaacgaggatttggcgagtttagaacatttgggtacttccagatttgggtttgtaaattcgcaattgcgaagtcaggcatggttgagtattttgcagtccagagtcaaagggtcacacgcatgcgggtcgttgaaagagccgcataaggacgaatatcaagtgaacttagacgtgaatagatcattttcttttattaaagattcttcagaaaaattacaattaagggatctgctctatgatacgattgtgaaaactttaagaaagttcccacagttaaattattaccagggatatcatgaggttgtgtcagtttttgtactagtctgtgaccgtgattctttgaatgaaacagtagaactttttacattactatatctcagagattatatgatggactctctacagtgtactttggaacaactcgaagtattaagtcaatttatcatggaaagagatgctgacttagcgaaaatcttacaattgaaccagaaaaagcccatatttgccattgcttccgttttgaccttattaattcacaatttcgaaaactttgaagaagacagccctattttttcaatctttgatatcgtaataacgaccaataatttatctaatctgttcgtcgtttatacagaactgttaatttattttaaggtgccaattttaaaacaagtggaggcttatgaaattgattttgagaatgacatggacctgatacattctgtagtacaacaaactttgctgaaatttctaacccgatcatcatgggatgaaatattaacccaggcaagactacggctaaacaatagtacggttagagtggcaaaatatgtcaacaaatacagtagtttgatatctgtatccaatattgagttctctgaattaataaacgttctttcaaaagaaatagaatgggacgcttcaaggaaaatcgtcaaagcgtcaccaaagattccactatttgttaaatggtctctcgttataggcataattgcggctgtaatcaaggtgggttcttcacataccaacactatacatagttcttcgttgatagattctttgaaaaaggtgctaagtccgtaataagtccgtttagttgccttccgtgtaatgatacagatatatttaacatgtatttattttatacaggttaccgaatacttataacactgcttcatcaaatgtttaatttagttcaatatcatagattaaagttacatcggtcgctgtaccttgccagcctcggttaccacttgtactaatcatgaatctacatgtaggatccacataaagatttgagatacatccaccatgatgtcctggaataataagtggggttttatcgatatggttaatatcaaagattctgatgttatcgttagatgccgcaacaacgtggctattgttaggcattgccttcactttagaaacgggtcctgaaattgatggcaattttaatttgctttccactacctcgggctttcttaaatcatatatttctacaacagcatttcttctacctgctattactttacccccgtctactgaccaacatgcagacatgcaccatggcggtgttgaaacattacgaccaagtttgataatttcgctcgagggttgtcttcgatcccagatttgaatattaccatcaatgcaagacgtcaaaaataagttttcatccgttttcaaagctaaagtattcttactaatggtttctgattcgaccttcttttctgatgtgtgttcttgtatctcatttttatctttgttttcttgttgagtattatcttcagctttctcggtattatcgttggtagctacgtgttgatcatcctgatcatcatcatcatcatcatcaccaaacaatgaattagtatcaacatcatcgatatcagctgcatctccgttgccaactacattattgctatcgacatcaggattgtgtccactcaagttaggctcaggaagttcgtaggcggcattggtgggtctgaattctaatgaagacaactgtgatgtagcattgaacttggttatatcagttcctgtttccaaatcccattcaatgacggttttgtcccaagaacccgataaaaacctagtttcctcatcattaagtacaagatggttaacgatggatttatgacctttaaaatagtgtgcagtcctcccttcaaaatatctaacaccctgcattacgataccgccagtttcttgtccggctagtatgaacaaacattcattttgaaccgccaaggagtggacaggtgagacgagaggaagatactccgacttttgttttacccattttacttttgacggaggttgcggtacttcattctcccaataagaagtcaagatacccgcattgacaattgaatccaccaatgcgttcttctgctgaatagttagtgatagcttaccatccacagtatttaagaagtcaaacttccttataaacccgtctgacccaccgagaaatagataccgtagacccttggacatggtcaatgcctgtacattagtctgtattggtattgctgcagttggaagtatattataagattctgctacagatgcagatctataaagagtcgtataatattgatgtatcttatccagctttgacatttcagtagatttcccatctgaagaagatggagaatccttctcagaagttgcggattccttttcggcactctcggcatcatcatctccaatttcgtgggtattagattgtttaatttcccccgttctcgtgccctcttcaccattctctgtctgttcttcatcttcttcctcgtcatcatcgtcatcatcgtcatcactgcgttcatcatcatcatcatcatcatcatcatcatcctcacttcgatcttcagcatcttcgtcatcgctccgatcttcatcctcatcgtcgtcatcatcggcatcttcagcatcttcatcttgttcttcctcgtccatcggctcgtcctcttcggcgttcggaacatccacatctacatcctccaattcatcgtccatgtcaacatcatcatcttgagtattttgaacgttattttgattcaagatttcatccacatcatcatccatattggaacgtggcttaggtgggaaaggacaatgttttgttgtgatgtgttacagtgtttcctgtcatattcactgtgtcctaaattcgtacagacaggtttattttggttgaaatcatttcaatatcaacagttttattttccaaatatcaaattgaatcagaacactttcaaatggagacaacaagataacgatcctattatacactggcggagcttctaatcaccgctcaatcggtatctaactatagaacaagtcactcaaacctttgaaaactacaagccaaaacaaataatggcctcgaacgacctagcagtggaagtgcacgatctaacgtacgcattccccggaagtaaacgctcagcaatccacgatctatcgctaagtgtcgaatggaacaagaaagtcttagtggtgggtaacaacggtgctggaaaatctacgctgttgaaactactaagtggtaaacatttgtgtctcggtgggaacataaaagttggaaacaagaacccattcgcaccaaacaatgaccaggagtccgtgatactgactacttacttaggcactgaatgggctagtatggctattgtacacagggatataggagtcctggaactcttggagagtatcggactaagccactacagggctcgaggtgaagagctagtgagaatcttggaagtggatatcaattggagaatgttcaaacttagcgatggccaaaagagacgtgtacaactgtgcatgggtttattgaaacccttcaaagttctgctattagacgaagtcactgtggacttggatgtcgtggcacgtgaccgtctattccaattcctggatcgagaaacgagagacagacaatgtagcgttgtgtatgcaacgcacattttcgatgggctagcaccatgggctgatgagattatccatttgcaagatggcaccatcacaagaacgttggattaccaacgtgatatccactttacaaaggaaatagagggcgtccaagagcgaaaggacaacggacgacacaccgtgatactaggctacatgaagagtttatacccgcttgcactccactggttgaccagagaccaagtcgaagaccaaaagctttgattcaacttctaaacggtcaaaccgatatatgtctgtaatatactatatatacataatcagactttaatcatacacaaagcgaaagataaatcacgtgagtaatatatcggtccattgcctaggttccctcccttcctcgtttaaaaaacgtaatgctgccaatcgtataacgtcgtttacgggatttcgcctcgagggaacgaaaagaatgaaaagcataatacgaagcgaataaaaaaaaacagttaggaaaccccagaaactgccgtaccagaaaggaaactgggtggtgctgaaatgtgcatcaaagcccaactggcgacagaaaaacaggccacaacttgcgaaaagtacgccgtaaacactctagaagaaaagagctagtcgtatagactagctgtgataacggtatgaacggcttggtttcgcaagccaatgcttattgaagaaatggaccgatgaggctcgatactcttcgcattctatcgttaaaactcgggttttttatcgttcaatttggttaacttcgtgaaaaaaaagttaaaaatgaaatcgtgatattttctatacacactgatatataaataatatatgtatataaggcgatgagttagccagtttgatttagttgctagattcagatcgtaaaagcagcaggaataagtcggcatatagaagcaaaacacagtagagggagaatcccaagctgatatacatatattcgaatacacaccatggatttattattggaagtttgtgatacgtatctgttggattacgtttatgggaaagtattccctgtgaatatgctacccagcagtgttaccaatagtgttggtcagtttttggacttgaacacaggaaatttaaacggcactgcagccaagccagctggtgatgtgtacggttatgaaccattcttgttggaattcactgattatacgttccaatcaattttccctcgttataatttgtttagagaaacgctaacgatgtttgtcttgatgacaatttttggatgggctttgtacttcagtgtcgctacgatgtcgtaccttttcgtttttgataaggctgttttcaatcatccccgttatttgaagaaccagatgtcgttggaaatgaaacaggcattcagtgccatcccagtgatggttctgttgactataccatggttcttgttcgaattgaacggatattcgaagctttacctcgatatcgattataaatcatgggctggaattcgtcaacttgcgtttgaagtgatctctttcatcatgttcaccgattgtttgatttatttggttcatagatggttgcactggcctagagtttacagggctttgcacaagcctcatcacaaatggttggttaccactccatatgcgtcgcatgcgttccacccagtggacggttacatgcaatctgtgccataccatctttacccaatgattttcccattgcaaaaaatttcatatttgattcttttcaccttcgttaacttctggactgtaatgatccacgacggtgaatatctggctaatgaccctgtcattaacggtgctgcttgccacactgtgcaccatctatatttcaactacaactacggacaattcactaccctatgggatagattgggtggttcttacagagaaccagatcaagaacttttcaacaaatctttgaagaagagcaaacaaacttgggaaatccaagtcgaaaagatggaggccatcaaacaagaagtagaaggtgactgtgatgacagagtttacgtcacaaccaaagcttcttaggttaattgtaagtcgctctttctcgattcaagactcttcactccactttgcatgcatttgcacaccataacgaactacattcaagactgtaactactcgttttcttttctgttatgattatgactactttttttttctcctactcacaataaacacatgtccttcgtacgatatctcatttcccctctctcggatacctgttaccaattgaatttccatctcttcccttttagttaattgatgtctgtcttcgttggatcaaactttccccatttttatgtatctatatatacatcttacttacttgtacaattatagaaccttcaacatacgtgtttttattttagtaattatagtgattccttgcgatactacaaaatgctacaccttttccttgtcttttgtcgtccttgtcttttgtcgtccttccttcatttatcacattaatgacataaaacggaaattatagattagttctaatctcttcggacatgaaactgaaccattgggtttgtcactgacaagactaggggtatagcgtactaacctacattggctacatgacaaacaagacaaatatgacaactccaattaagattcaaacaggttgcgctgatttagaattgtttcctgacattgtggtgaaacggatagatcttgagttgcaaagacctcctcataatgcacatactgagttagaaattttgaaaacactatcaaataagcatgtgatacccttgctcggttctgaaacctcaccaaggtatgttacattcaaattcaaacggtatcaatgcgatttaaaccagttcatggaccaacattggaaggcgaaatacaatccgtacttgttagataattctacaaaaacatattcaaataccataccactcgatcactcgacagtgattataagacaaataatcgagggattagtttatatacacggtaatggcattatacatagggatgtcaaaccgcagaatatcatgcttaactcgtacaatgaagtcgtattaggggacttcggtataagttacaataggaatctggataatgaggccaagacctgtgattgttccacatcaatttacaaagcaccagagcttctctttagcgtgtcaaattacaaattcgagatagatatttgggcattagctgtgttgatttctcaactctggaacgataaaacacaatccaaatcaaaaagcagcaaagtgatagacattgatttcgacgaatgttctgacataaaacttgtgctcactttatttgataagtttgggaaacccagtaacgaggattggcctcaggtgactaaaaatgaatcattcaatgggatgttcgggaatgtttcaagcgataatttcttgcataggagaccaattgacgaacaactgattcaagtgtacaaatggatgcctctcataacggacaacccaaaattagctaagatgtggctacgcatggtcaaattcgatggtaatctgagaatatcggcagagcaactcttggtatctatctagtagtgtttctttgtagctccataaaatgttgaacctgctttaatctttgtatctctttcttctgaactaacatctgtcttttcatctcgttcaattcgacagatggtgtgctaactttcttctcggtatccatatttaaaacttcggcggggtgacaacaataccggttgtcagaaatttcatttgaatccattggcagtttccctcgatttattgtccttgagtggactattgtgaccttgagagatgagatcaaaatccgttttcaaattagaaaaacatacaagcacgatattggattcacgaaatagataagttataaactacttcatgtctatcccattagctagacctacgatctcacaggaacattaacacataggagaggactatgtttctaaggttactcctccatacatggaggaaatgccgatcaatcctgcttttgctcattactgcaagcgttttattctactatacctttgaaaatgagattgagcatcttaattcttttgcatacactgattctttaccattgattcagaaccaagattcgcataatgctcctgtagctggttctgcagataaaattacacacgatgaaatatccaaggagctgaccgataagtcgagtttgtctgaaaagaataagtatttccccatattgctagagaatagcgacgaagccttgaagtatcggtcggaaaattatgacagtaaggagccattccaccccttccatcctttctatgagaaaaaaactgttataccttacaaacaaattagcaaacagtatccgcaattgaatcgagtgtcatctattcattcgaacgctttaataaaggacgagctattgtatcattggacagctagaataaaccgcattacagaccatgcctacttggatttgcaaacaaatatttccattttgtctacggactcacttttacagcgaaatgaatcacttcttaccgtgaccgctgtacttaataagtttgatgacccaatggatcaacgggtctggtcatctgagattttaggttcattattagctgtaattggtaataggaaagagaagaatcctgaattgttacagttgataacgataataggtgaaatgttgctccgcagttacgacactccaaactatttaccgcagattcctttcttttggaaaacatctgtcccaaatcgatacgctttcaaaaagacaaaaactagcatgttagcaactaatatacttgagtttcttactttgtcacacataactaatgacccacaatttgactcagttgtttctcactctttgcagacgatgtcaagatccgtgcttttattcgatatagattaccttttcccttcctttgttgacgcaagtggttgtaaacctttatctgatgaaaaaattgcaaaaggagaccaccttcgtgaatccaacgttttgaagtctatgcaaaatggtaagtatattcattgtgttatcaaggaatcgctacttcctcaacataatgtcgatggaaatcccattacactggatacaatcgatttatacttgaccgttttgaaggcttatcatcttaataacggtaatctgtttgagaaaagagaggctgaaaagtctatcactaaatcgttgttacactcaattaagatgataaatgacacaatgctatttcagccgtggcttccatctgatttagaggatcttttgcttccaaccagtattaaaacaaacattcatttcgacgttttagaggatagaaacgaagtctctatcgggaaagaatacaaggtgacgccagatggtgctaaaatgagttcacttttatccatatctagcgttttgtttaatgattcatcattgatcgagcaagcaaaggctatcactaaggggtattacgaattatacaagttgttagatcaaattccagatgttgtggcattggatagaaaacttcctactttcggaatgtttgatccaactgctaagattgcgctaatcaaatctggacactataaatcaaacaccatgcagcaaggcgtcaaaattacggaaacgacagaagacaaatcaaaacactatacgaacacggatgcgcacagcttctcacccaacgtcaaagacataaatgaagaacaattgtgttggaagctgcatacttggccgttttatgtcaatgatatggtggtatcaacaaggccacctttcgaactcattgagtcgttaatttatctttacaaaataaccgaagactatcaatggaagctcatcggtgaagatcttatgcatagcatcgaatggtcacaattaaccgtagcggatacgggaaagttagtaaggttattttatgcattgtttgaggatcacgttaatattgatgaatacgtcataaacagcaagtaccatttcattgccagacaatttgaggttaatccgacttctaaacggatttatcatacctttgacgacataaaagaaaccaacaagctaatgaacccgtaaatatgtatatattcgcatttgttatagcaagaatgatcatgattattttgttgaatatgattcaattgttgaattgaactacttaaaaaatatacgaaaagagatgctatttatacatatcatcaattagataaaagagataccatttgttgaaaattagaacccaagttgataaaaaagagtgtgaattgcaattggtattacggatcatcaatttgttggatgtccataagaattgaaataggatagtcattattacagtgtggaaaggaaagaaaacaagtgtctgtcaaatattttttaatccaagttcgtttacactggcaatgggaattcaccggcccattggtagatttcgttcttcaattgggtcaattcttcagaaccttcgttgaccttagccttgaagtccttcaatttgttggcttcctttggcaaagattgttgagtcttagcagcaaattgaacggccttgtcaatgtagtcgacgattctagcgaattctggttcaccgaaacctctagtagtcatagctggagcaccgatacggacaccacctgggaccaaagcagatttgtcacctgggatagagttcttgttcaaagcgatgttgatgttttcacaaacgtattcgacacgagcaccatcgacacccttttctctcaaggagactaagaccatatgggagtcagtaccatcggacactaatctgtaacccaacttcttgaaggactcttctagaaccttagcgttcttcaagacttgagtttggtactccttgaattctggagtgttggcttgcttcaaagcagtagccaaggcagagatggtatggttgtgtggaccaccttggtgacctgggaagacggagaagttgattggaccttccaaatcgtatgggatttccttaccagtctttgggttaacagatctgatacctcttctgaagaagatcatagcacctcttggaccacgcaaggacttgtgagtagtggtagtgacaatgtcagcgtattcgaatggagatggaataacaccagcagcgatcaaaccagagatgtgagccatgtcaaccatcaagtaagcaccaaccttgtcggcgatttctctcattctcttgtagtcgatcaaacgacagtatgcagaagtaccagcaaccaagatctttggtctgtacaagatggcattcttttccaaagtgtcatagtcgatgataccagtctttggatcaactctgtatgggaaagattcgaagtaagtggagacagcagaaatctttctgttttcagtttggtaaccgtgagacaaatgaccaccatctggcaagaacaaacccatcaatctttcatgaggtctcatcaaggcttggtagacttgcaagttagctggagaaccagacaaagtttggacgttaacaccccatttgtcagcagtcaagttgaaagcttctagagctctcttttgacacaacaattccatacggtcaatgtgttcgttaccaccatagtatctagcacctggataaccttcagaatacttgttacacattggagttcccaaagcatcgaaaacagaggtagaggtgaagttttcagaagcaatcaagacaatagagtgcttttgtctgtcaatttcatccttgatgatttgttcgacttctggatcactttcagacaagtgagcagaaaccaagttcttgtgagagtcagatagagcgtatggcatcgttagattattatagttgttggttctatccttaatgaagagtagcttggaagagaagaaatactataaacctctaaaacaaaacgaataacaaggattccaagataaaacacaattagataaatggtagtccaatatatatacttgtacacgtttccctctatcaggtatccttcatatttataacgaataaaggatttcgtaagaacttaatttttttttttttttcaattaaaatttcacagtaacttgatcaaagaattatgataattctgaaaaagaaaattactacgtaaataaaatcatcgtaagtactttcagtactgacagtaaccttattacttacccgttgtaagatagaattagcttggattggaacctgtgaaaaaaatttgggactgttacttatgtcactgctgctctgctgcgcaacggcagtaatagtaccttcaagtcatcggaaaaaaaaacacagtgatggttatgtaggagcactacacatagttgcatacatttgtgtataaatttcgtggcccacaaaatagtagtgaaatgagtcgtgataatacgggcctttgtatccaatatatgacttgaatggagctggagcggtgatacacacattttgagagccaccactgcatttcttgttcctttttttttcacttttcacttctcgagatgagcttccatttttgacttgaaaaggttcgacagtagacttgacgaagaagaggcatggcattggcataaagagtttgacttgagtgagggaaggagtatacagatcgttatatacaaacaggatggatttccctagattaaatagattccttgattgcttcgaataccttgtcgatgtggtgcaagttgtcatcgatggcagagatacccatgtgaccaattcggatatacttgtccttgatgccgggtaagattccaccggcgatgactataccctttgatttcaaggaagagatcactttacctggttggtcgacgtatacggcagtcaatccatgagcgctgttggaatcctctgagaccaaagtgagacccaattgtttcaagttatttttgaactggtcagaagttttcttgttcttggcgattctggcctcgagtccataggacaagatttctccaagggagacgtttaatgcgttaactaattgaattgatggagtagcgaaatattggcctacaccagcttcgtatgctttcatgattgggatccatttctttaagttagcatagaatccatgggtggattcgttgctcaaagcgtatgataaggcgcgttcactgatcaaagaaacacttaacccagaaggacatgataacgccttttgagatgcggtcaaaacgaaatcgacagaccattcggagaatttaaattcttcgcatccaatggaacaaacaccgtcaacaataatgaaagtttctggagaaactttcttcaccaacgaggtgattgatgggagatccaatagggtagcagtagaggtatcgacgtgagtcaaagtgatcaattggtatttcttggactttaattgagattcaattttgtctaacgcaacgactttacctggttcgctctttaacacatcgacatcagcaccgtacgttttcaaacattcagcaaatgaatctgagaagaatccggtagaaattgtcaacgctgagtctccggactttaacaagttgttaccgacgatatcccatcctagggtaccggaaccagaaatgacaataggttggtcaccagcattacttgtttggaaaactgttctcaacttttgcaacgccccttgaaagatcttaacaaattctggagaggtatgagccaacgattgaatgctggcggcttcctcgacagccgaagacaccataattggacctggaattaataataaatctgacatggcttttttgttttattttctggggttctatgagtctttatgcttaagtctatttttttttgcccaactcttgcttgatccgctttgacaatctatctaacttagttggtataacggcttctgttattagttatatttctttgcctcttgcctggcaaaactttaaagcgacttgctcaaaagagacttttttaactgttccacatttaaatgagtctttcggtcttttcttaatattggagcgcaatcggatcaagaaaaaaaggttagtatgattcggagaagaccgattaaaggaccgacggaagagaagacaggataaagcaagatagaggtagtcatgtgacgaagtagattatatcattctgttccaaaaacaaaagaatatctttctgctatttagtgatactcaacagtcgctgcgtaaggatgaacgcgcgccacattaaatacataagatacagagagatacatatatacttatcttaaaataaaataatatcgtggattgtcgaatgtcatgatatgctgtcatacaagcactctgattcggctggaattgttgaatggaagccatataatagtagtacccattgtaaaaaaagattgaatagtagtagaaaacaaaaagaagatccgaaaatgatataagaataaaggtaagaaaaggggaaaccaatgttaaacttcatgagaggcctccgtcacctctcgagtgtctggtctaatccataagatcgtcaaagtccacggctaacatacttgactgcgcttcgggcagagaagtaaaaaatactcgcatatacaatgtaaagacatcacgcttgtgatattatctcttaacatttggcaaaaacacacacacaggtgtttgacccttgaaaagggcaaactgggaaagaagagaaatgagagaggaataaaggagcttgtattagctgtgagacggctagatttgactgattattgactggatacaacgtggtgatcatgtctcttctcttctttcgcataagtgtctgtgtcctggtatatgctgagtatcgtatacttttcatgttacaatcactgctggattgcgccatgtgtcaaggccgattggacttattatatctgatggttcaagttcagacaagtcggagtttagttcaggaggtaccgtcaacaagaggttccaaccttcgccagtttcctggtttctcatatctatatttttgttgtcgctgttggtaccatcttcagcgatgaaggaaattcccacatcgtttagatcagcatcgccattattttctaaaagcatcgaatggtcttcttcgagctttaccacaggagtagatgatagttggtaattctgttgtcccaagatgtaattcaaagaattgttatcttcgtcaagcataccattgtcagttaccattccatgcggtagattcgaaggagaagaagaggatgaagaactacttattgatgtcgaatgacttgaatgagaataatggtccttcttatcaggactagacgttagactctctggagagtctagcatcccggtgttactgtcatgagaagaaatacttccagaatcactgacttgcatttctctccattgttcaaccatcccgctaagcttcgcgttattctcactcaaaatatccaaatcaaccattttcaaaatgccttccaatagatgacatttctcttccaaccgttgcacatgcaaacgtttcttctcacgagattgatgtgcagccctacggttacgcaaaattctctcgatccttctctgctccttctcttcctgagtctttgcccgtttccttggtggtaatgtgggcttaaagttcactggaatatcactcacgctgttttttcctgtcataatgaatttgtaatatcttagcttcttatttatcagtctctaaccgtctcacaggttgtttatcccaatacaagttattttgtctctgagggtggaagatacttaaaaaatatataagatgagcaatagtacattcttaaagctatcgaaacatggattaagaacacatcatcatattcaatctccttatatactttttctcacctgaaaccaaaccgttaaaaaagatctttgaaaatctttcgcttccaccccaggtcgttaggatcaggatacgtgggtcattgcgactgccaggaaaaagccacctacacagaagttgacgtaggaaaacagtggccaaaaacggtttcagttcttttgatattctataagggttatttttggacatgttttccgggtaatagaaacgttgacacgtgatgtctattctattttcgtgccttgtccactgtacttttgacatcttcagagacatttatgagcatattatatgtatgtacgatcatctggctgatgttatgacattattgctgctgtcatctgcagaatcaagtttgattttcttctcgggttgggacgaagtttctaattcgggatttccctcggaatctctcttgttatcttctttttccttcgcattctcagcttctctttgtatctcagccttccttctgtcaacgaattctttcgtttcggtgtcatttttgaaataatggttttcgtagaacttcaattgttcaatactctccaggatatccgccttggctgtgtgtgcgccctttttcttgtacgtaacgcttgctagttgtgggttatgcctgcgcgccacttccatgatactagatacatcgataatcctatagaacaaatgatcaatcactttcgggaactcgttcaacatgaataatcggtccatgtgtaccgaatttccggctagcacaccttgtctctggtctggaatccatttcttgatataatttaatagctcttcctccacttgttctctagtctttaccgaatccagtactttttgagttagaccgctaaatccatgctggttgatacaccattcgttcatgttgtccatgatggatttatcgtaatggattacactctcgtacccatcttcgtcagcgacgtttagttgtccatctgtgatgatacaacatacttcgatgattttgtcattgatatggtcaagtccagtcatttcacaatcgatccatacgataggttgcttcaacgcacccggtatcagagctgcaggaggattcagcgtcgtgtcattgtttgaatcgtgtaaagtagtcattattgtcgtaggttggctccaaattggacgttttttcaagtatgggttgtagaaccgccttgttggtagtagaatacgttggcgtaacctggttccaattcctgtgaacatccaaagtttgatctctttgttcaccaaaattttatagtcctagtggatttgctggactaaatggtgcaattatggattgtgtgtcctgattcaaatggtgaatagattacaacttatatcctccactctgtctaagattatgagattctaactgttaaactgtctcctgtagattcccaattccgtttgcccatcttgtttcttggatctatgtatctctctaatgtcaatttttcaatttgcttaatttcaatatacaaaagtgaaaggaaggaattattgaacttgtacctaaggatttcaggatgattttgaatctattacaagtaagtggtaccgcatagtacaaattgattcaaattcgcgctcctatttgttgccaaatcgattctcggtgctttgcaggtaaaatcaccttggtttgcttcaaagtaggcagattaaaagaagtattatccagcattttttgaaggggactccgtcttttagttttttgtgcgatccaccttggtttcgctagacgtattgttatcataatttcccactctattgatcgtctccattctcattccgctttatagcttacttttatcctttcgattgtgcctcccgaaatattttgctcaactaaaaggtaatatatcaaataatggaacaagattctgacgaggcaatctctgtctcgtcttctaattacgacaaatatttgagattagccaccgataaaaaccctagtatacttttagaacttgacttacagggaaatgttaaacaccttagcaaagtatggaacaccgtcataggaaccaatagacttaagatcttggggaatccagtctcaaacatcatcataggaagcgattatgataagtctgttttccatcgtgccttgaatatgatgcttgaagatgataatagttatagagtcaaatttctgacggaaaccggcgatttaatgggtgatacagatcaattggggttgtcgagctctccttctaaatcctccgattcttcttctgtgagttcaagtagtgacgaaatcaatgctgaaactattagaaacgataacaatgagcttatagatgcagaatggcacggaaatggggataccatagaattagaagcgcaaggaatcttaatacatgatatttataccaaaaaaccatcgcacactatgtggatagtaaaacctctttatgatattgatgagttagataatttgccgtatgatttggtaaagagattaggatttggggcaaaacttttctcccaatatttgcagaagatagaagatatgatgatcctagacgagatggatcttcccactcctaatttcgaattatgtcgagtttgtgaagttatggttcctacatggtggctcgaaactcactctcagatttgcgtttgtgagcacagactagaaagtgtggtgcaaactgcacacgacgagctactagaacagaaaggtttaatcgaatcgattattggatcattagaagaacaagagtaccctcccattacagaatataagaattatccactaccccaaattaatagtaggggaagatcaccaagtccgccattccatgaatcgaatggatcctatcggtcatcttcaatggaaagatcaagttcctcactgctgaaatcatctactaatattatgcagcaaaacatgagattcccatttaaaccgctatatatgttgaaagagctatgtgaagaggcaattcaagtcaatacaagccagttgaaaatgcaatctgaagaaatatacaataatggtattctgcacccaacttcaacattctatcaattttccccaaatactgaattgcatattgatcatgttttgaattggaaatcttcatttgaagtttcagatcctgccataaatttattgatacaggacaccatggctatatgtagacagaaggtcgaaactgtcataagaatggacaacactctcaaatattcacacaaagtaaagaatgaggtggatttgtcaatttcacaattaatcaaagaaaggattcacagcaatcgattgaatgtttcttacactttagatctagtgccgaatatcaattcgggaccaggctcagctgttaatctaggaacaccttcatcaccaaaattagccacccctcttccacaacggctaccatcatccagtaacctattctctgattcttatattggcaccgacactattccagaacctcatccatttggcaaatcaaatgctgacattgcaagatcttactttgaaaactccggttcaaattctgcacatgcatctaaatctgtaactcctaaacaatcagtaggagagcaagattctaagataactactgatgatatttcaatgggcgaaggattggaaacttctatggatagccgatctaatccttctactcctaagtttgccctgaacaattattttcatcttcccaaattaacaagtagtatcagtctcactcctcgaagaggatcacctgtaaacttctctactcctacctcgtatactcagaatggtgctcaaatcaatccaaattatttttcttccgccaatatcatgggttcgttatccactacgaagtcgatcactgacaattcgccgatgctctcgcccttcatttccggttctgaagcaatgcaactatctgatagtaatcaacatcgcaatcaacctctttcaccgctactgcttccaaccacaggtaaatcgattattccttcgatacgagactacgatgtgattaaacccatcagtaagggcgcctatgggagtgtctaccttgctaaaaagcgtgtcactggagagtattttgctatcaaggtactcaagaaatcagatatgatcgccaagaatcaggtaacgaatgtcaaatcggaacgcgcaataatgatggttcagagtgataagccatatgttgctagattatatgcaacgtttcaaaacaaagagaatttatttttggtgatgcagtacttgagcggaggagatatggctactttaattaaaatgatgggtaatttgccagaaaaatgggcaaagcagtatatttgtgaagtgatctcaggtgttgatgacatgcatcaaaatggtatcattcaccatgatttgaaaccagacaatttgttgattgattctttaggtcatatcaaattgacagactttgggttgtcacgtatgggtcttttgcgtcgtcataaagagaagaggcgtaacagccaaattcaaagttcaagaaatcccagtttcacttgtgatagctctgtgacgcgtaaaaattctgtcacagattcattacaatccgtaccgggcgcggctgagaatatttatgacttagtcaaaaagactaaaggtcccaatcatcctctagcgcacattcacaatctccatcaactgttaccgacgtaccttatttgaaaagaaatggttcccacgtttcatttacaatggctggtctttcacgctccggcacgcctcccttatctgcaactttgatgtcaacatcagatcatctaagtattcccaaccaaaatcatcaccatcattccaggacaaactcaaacctttctgagaccaatgtccacgattcgcctaaggatttgtctttattcaatcccaatgaatctaagaatttttttggaactccagactatctcgcgccagaaactataaagggtactggcgaaagtgatacttgtgattggtggtccgttgggtgcatattttttgagtttttgtttggatatcccccatttcatggtacaacagtagatgaagtcttcgaaaatataattggtggtgtcatacgctggccagaattccctgatgcggagacagaaatggaatacatatcaccagatgcaaaagatttggtaattaagttattggtgcttgatccgaacaagagacttggtgccagtggctctcaggagatcaaagagcatccgtacttcaaagatgttgattgggaccatgtgtatgacgagcaaccatcatttgtaccacgagtggaacatcctgaagacactgagtacttcgatttacgtggagcgtctctcgatgaatttgctgcttcgaatttcgatgaagataatgattatacgatgctagacgccaaaaatggtacaaaatcactcgactctcagttacatcggagactgtctgaccaaagcagtggtagaaacactccaaaacaaagattaagtataagttctgttcttgaaatggtgaaccaaaacttagaatcaccaaccgcgaacaattcaccgattacaaaacatataccgctcgctatccctccacacatgagagacagacgtagtagcaaattgaacgactcctctccagaattcggctcctttaactacagaaacttaaatgctttagataaagccaataaagatgcaatcactaggttgaaatcggaacatctgtcggagtacctccaccagagaacttcaagttcgtctttatctagctcttcttcggaaaactcaggtaagctgaaacaatcaagtgctaatagtgcacagggatcagtcccaacctctatgggtacacgtagatctaactctcctcaagtactgaaatggaatacgaatgcttctccaagcaggcgcaacagtgtcgacaccatgagccctcaaccgtcagcgactaaaagattttcggacataggatcatatctaactgaagaatctgctcacgggagttcttcgacgtcatctccgttagcatcaaaattcaagtctccactatcaccaccatcagtaaacggcactctgggttcaatttcaaaatcacggaaagtatcaagaaatagtttcggttctacaacggaggatgatgagagactctccgcattatcaagggtaaacaccgtcagaaagctcagacgacgtagtgggcggaaatcttcttccaactcgaacggtattagatacaagttggatgtcttactctgtgaacctattccaattcatagatacagagtagcagaagacttggaaagcattgggtgctctgttgtttccgctggaaatggtgaagagttggttcgtcgtgccacaacaggcgtaaagtttgacctaatcatcacagcaatgaaacttccaaaattaggcgcaatcgatatagcaaaacttataagacataccaatagtgtcaattgcacgacaccaatagtagccttaacagtctattatcacgacgccaaagaatctaaggtgtttgatgatgtcttggaaaaacctgtaagcgtggaacagttacggaaacttgtgtccaaatatgcgctacttaagtcacaaaacgaagaagacacgcttctgagtgacacagaatcttgaacagcgaatagacttcgaactcacgaattgtcctaaatatatatatatatatatatatatatttatactagtcaatgcatacatacatatacacactctcttttattgtgaaagctatggatataggaaccttattgataattataatgaatttgacgtagtccttctgcagcattcaaaaaaaataaaaaataaaataaagggaaaactcagatttaaggaaagaatgcacagaaccaccccttaaagaatgatatacttaccgaaggtgtcaggaagatacacacacacacaccagagagctatcagcacaatcgagtcctaagcggttgtagcagcaagtgtgttacatacaggaataattgatacaagctattataattgccgctgtttctttgcttcttttttaatcatcaagttcccttatttgacgctcagattcactacacttttggtcatataacgtttaataagagagcagcaacaaattactaaaagcaaatatacatcattcatttgatagtcttttcttcactacatttgcaaagctatagtttcccttttaaaacaaacaagaagtgtctgttttcagttaatgattcttactttttattggaacttagaacacattattgattgcttctctactgtaagacagctggattgatagttacagtgagaaatttgccaattggacacacgtattcctttttatcgttttgtttaacgctgaaaatccttcgcaaagcttccccagagtacccccaattaatcgtactctagatattcccaagtttaaaatagtcaagtatcctctggtaaaccctttccatttactagatttacgtattgcagaggcaaaaaaagaagaattcttcgaatcgttctaagcgtcttttagcctctcttttttaaatctacaaaataacagcattattatttgcatcgctatttgttagagccagctcaactgttacatttctgacgctcgtaaagtgctttactgtaccccgtcaaccgttctcacgtgaagtgcctgcagttttctacccacaaatcaatcgatttttccttcttttatcaagaaaatcgtgaaatcgtcgaattctgatttttttcttccaaagaaaagttttaggaaatcggaaacattaaagttttctagttaaaaaagtgtaaagaaggaaaaagggttcttccttgaagttaaaacaccgttgacacggtaccttacaatcgtctttgagaattcaagtgttcccaagcacagtaattgttggtgagctcgtcacaatacacgttaatagcaagttttaagtgcgaattttgggttttacttctattcccctttctcaaaatcagatttccctacagttgaaagaaaactgaaaagaaaaagatctgattgcgtatacttatctgttactgtagtctggtggccaattccagtgtacatcttttgtttcgacttggtttaaaccttttgttttatttctgaaaagcagtttagctgggatcagttgttttatctgtattggacgcgtgtgttttattagattcctcgataggaagcgttggtaagagatatgtcacagcacgggttcgatttcaagttcagtcaatgctttggtgataaagcagatatcgtggttacagaggcagacattataacggcgtcggagttcgatcatacaggtgattatcttgcaaccggtgatagaggtggacgtgtagttttatttgaaaggaacaatacaaagcattgcgaatacaagtttctaacggaatttcagtcacacgatgcagaattcgattatttgaaatctttagagattgaggagaagattaatcagatcaagtggtgtcggccaacgaaccaatcgcatttcttgttaagtacaaacgataagacgattaagttgtggaagatatatgagaaaaatatcaaattggttagtgataacaatctatcagagggaaataaagactaccacagacgctctgctgggaacggtagcgcaagagctgtactgtctttgcagactttgaagttacccaagctgtccttacatgatagaattatagctgctgcaccaaagaagatttatagtaatgctcacacctatcacatcaattcgatatcgttgaattcagatcaggaaacgttcatcagttcagatgatttgagaatcaacttatggaatttagatataccggacgaatcattcaatattgttgatattaaaccagccaacatggaggaactaacagaagtcattacaagtgcagaattccatcctcaacagtgtaatgctttcatgtattcttcatcgaaggggaccatcaaattatgcgacatgagacagaatgctctttgtgattaccgagctaaggtgttcgaagaataccttgacccaataagtcataattttttcacagaaatcacttcatcaatatctgacgtcaaattcagtcctgatggtcgttatattgcatctcgtgattatttaaccgttaagatatgggatattaacatggataataagccattgaaaacgataaatatccatgaacaactagaagaaagattaaatgatacttatgaaaatgatgctatattcgataaattcgaagttgctttcagtggtgatagttcaagtgtaatgacaggatcatacaacaataactttatgatttatcccaacgtagtaaaaacgggcgattatcaagcacctactggaatggatgaaattgtattacaagcagataagactgcatttaaatcaaagaggttgagtagtttgcaacagcaaagtgcgagaaataaagaatggggtgatgaaattgatttcaaaaaatccattctgcatttctcttggcatccaagagaaaatagtgttgccattgcagccactaataatttgttcatcttctcggcattgtaattttactcctcatcaagttgtaatcaatagtgttacagtttgccattttacatacgtatatccatatgtacatataatctctaattttctcgtcgaattaaataacatatcgaaggtaaactaatagctcggggcatagcttcaagtgtgctccggatatattctggatatatgttgtatatacgctgtaccagcgtatcacttttcgttttccccttattttttgttcggttaacaatggggaacaatgtaaagttaaagtttttggaacgtaaagtcagtttgtattcatcattcgtgaaaaaaaagtaagtattgagttactaaagacgtttgccataacgctgagcatatcgaagttgatgtactgcttgtcacagattcagtacaatagatattgataatgaagaaacttatatctacttatgatcattgacacagtgtgacgtgttttattctatttttctaggactgaatttacaataaagataaaaagtgtgtttattcttcttgagttaaataataattatttgtatggtggaaactccactataaagtttatccatatgtttgttgtattttgaagtataatgccagattaaacggatgtttgaattcttttgaagataatttgaggatatttgataaaaggtgttttaaaagataaaaaaacccacaggcaggggctatcttgatatttcattatgaatggccaaagcccaacaagttgagatcatttatcgaactgtgtttaatcgtgagagacgtgtctgttaatgactgggttccagaacaaagtcttgtcaccgtcaccccagaagaaaggcttttgtcttaagttttggaattcgtagtctcttggccattcttcatctggaacgtgcttcaaatgttcacggtgctcagcgtgttcagcttcaacgaagtaggtgttgacagcggtcagagcaatagctggagcagcaacaaatatggagatcttaacccacaagttagaggtttgcttagcgtgctcagtactgtgcttcatgtagtccttgtaagcttgggcagcagccaaatctggcttaccgaaagctggttccaaagcatactttggtagagtagaagctcttctaatggcttgtttgaacatttttgattatatctagggtctggcttttcgaaacagaatatccttatggaattaattcaccaaacacagttgacgttaaatagatatcaaactcgaaatgaatgtaaaatgaattgtaaacagtaagaaaactaatcacaaaaatctcttttaaaaaagtactttgacttaccaataaaaccttttctattatggaaagagtagctttaataacttgaactttcctaactattaaacaattttttttttcctacctccaaaattttctagcatcaacacaatctctctcgcgatatttccatatcccactccatataaaaaaccaaaaatggcacgacggagaaactagacaaagatcatgctttttcgatgttgtaatttcggtatcacattacacggtatgaaaatgattggttgctggtcacgagagacttaagttctggtaatggacactgagcataaaaggttcctattccttgtttaaatggtgttgctgtctcgccgggactacaaacccacaagtagctcatacgataccgttcacactggcaacagattcagaagtacttcctactttattttctgtttctgttgcatctctttatacatattgacaaacagtgtaatattgacgttcaggaattcaagtccgggtaacaatatttgtttcacggcctggcggtaattgattttgggtttttagcaaacctgagccatcgcatgtcattctagtagctgctgcagggacttgccggctggggttggtgtagtggacagaaacaccgttcctaatatatagaatgctagattaagctgagagcttgttgcattgaattcaaaaaacaagcgcgttggctaatagaacgcccgtaggatcagccatggttatggaaatcaaaagattgcctattgctgcttaagtgtagcacgaacttgtgggtaatgtaacgtttgtaattacaagggcgtatgacataaattaaaaaaaagaagaaaagtaagaaggaacacatacagactcctaatggatactgtgtatcgacaaataaaagctaggacatttgaagtaaagagagtattacatctttagtttgtctttgaattctttgatttttccatgaatctttcgtatttccttttcacatccacttcatggatagatgagcctgtcacttgatttcctatcgtgaaccatccaggacggatgttatggtccctaccgaaaatttcaagtttacgggcatgtgtaccgacaagtctttcaatgattccatacaattcgtccggctttctactggtttctctagttgcgctaatgatcaagtcaatgtctatttttctgtttagccattccggattgcctttgaccccgacgagtaaatgctctttactgtggttcaaccaatggccagttctacctgtcacaattgttcttcctaattggtttgtcttgatccaagatatttcatttattacttcgtaaccccaattctgcaatgattctttccctacttcgatagcacggccggttacccacaagaacaataaaccttcttcctgcaagagatcaaatggtagttgcagtaactcattatcattgcaagtaccgtagggcaaattcatatgaatgttccatgcgggatctgcaataacggctgaaaatttaccaagaatatcgaagtcaaactttctgacgtcacatttgatccattgtggaggaagaagcttcttaaacgatgaagaacagcactctccatgcgtatagaacgaatactgcttgcgttgctctttttgttcttcaattttctgtttttggagagattcaggataatattgcagatagtggacgtatctgcaggtacttaacttgtgacaagtatccaaatacgaacaatctcccaacgaaagatccgtctgtggctttaaatttggtatgaaatgaatgtgcgtgttcgaacattcgataatatccggacaatcagcttcaatcttctttaatttttcaccttgcaaagacatgattttgttgttaacagtattgatgacggtggatagtagtgacacatgtttcggatctgagcatattggtatgaaaggtgatcgcttagtgtttaattttgcctgttctttagataacttagtggatccgagttctaacgagaggatttgatttaagtgtcttagacacttagcattaggggttacaatttcactctggtccaaaatgcccatcaacttatttaataatatgggttcgctttcaatttttctttctttaacctgaacagaatctttatcgatcgcaatctgcttggctttattgccagtatgtgataatgacaatttaatagcttggtcataatgaactttttgcaatattttcaaggagtccccatcaacaaatgaaatcttttggccaaaaatattcccgccactatcatcttcaaaattcatgcaaccaccacatacttctgaaattttattcaaatcttcacaaaactggtaatacgtctcaccacattcgttattcttccataggaaattttgcatgaacatggaataaatgacataaatgtcgtgtaagctaccattgatcggggatgcagtgatggacgcatagttgtccaacataaaatcaactaacccccaattcaaagacataataccagtttcactcctttcactgctcggacaatttctttcgagacgcagctatattcagtttcgtttcaccttgttactccactcaataaaaaaacaaccgccgacgtcaatatctctggctccagacaagatataacaaatccgtatatttttttcgatcaccacaactttcacaaactttctgtgcctacaatgtcatgaaactatatataaattgccggcttttcctctcagttccatccacgtttaacaatggttctgtcttaaaaagatggtgtatttcgtgatgaagctgggattttttattttcaaatccgagtttgatctaggtaggaattcgttgtgaacaggggaatacacaggctccaaactggcaggaaagtgaagggctttaccagtgtattatacgtgaatctgcaacgatgctgatctctctttagaattgtggggtacatccttcatcttgatacgttgttatcacgtgattggttcatgtgatgtacggagtttatggttctgatccacttggaataaaaaaacatggaatttgaaaatacagtaataacagaacaacacataaataaagtacggaaaggtcgaatagacaatcgaccgagccaatacccaactctttgcagattgtagctaccaagtatcaattctggctgagtggcagttattcattacgggtaagtggtagcggaatccttttcataagatgtcatcggatacacttaaatttgatgagaaaacggaagctgagaagccattgtttgattgtgattttgggacttcctatagtcccagagtctcgtaccacttcaattcgaaggtatcacaatatcattacggtgtcaagcatccaatgaaaccttttaggcttatgcttaccgaccatttggtttcggcatacgggttacacaaagtgatggacttatatgagacgaggtcagcaacaaaggatgagttaacaaaatttcattctgaggactatgtcaatttcttagcgaaggtaacaccagatacattgaataaacttcctcgagggtcactcgagaaattcaacattggtgacgattgtcctatcttccaaggaatgtttgattatgctgccttatatgctggggcatcgttagatgcttctagaaagctacttaatggtcagagtgaaatagctatcaattggtctggtggtctacatcatgcgaaaaagaacaatccatctggtttctgttacgttaacgatatcgtgttagccatagtaaatctactgcggtatcacccgagagtgttatacatcgatatagatttgcaccatggtgacggtgtacaggaagcgttttacactactgaccgtgtgttcactgtttcattccataagtataacggcgaattctttccaggtacaggtgatttggatgagataggttgctccagaggtaagcattttgcattgaacgttccgttacaagatgggatcgaagacgactcatacattaatttattcaaaagcattattgatcccgtaataacatcttttcggcccagtgtaattattcagcaatgtggtgccgactcccttggccacgatagacttggctgttttaacttaaatatcaaggctcatggtgaatgtgtacggtttgtcaagtcgtttggagtaccaatgcttgtggttggaggtggtggttatacaccaagaaatgtttcaagattgtggacgtatgaaacaggattattaaatggggtattgctacaacctaaacttccagaaggtattccatttagagattggtttggcccagattattcattacatccaacactagatgacttgtatgaaaacaaaaattccaagaaatttcttgaaaatatacggattagatgtttggagaacatcaaatacttacagggtgccccaagtgttcgtatggatgcagaactcatcccaacacaggacatcactggcctaactgaagaagaagaggaactgataaaagagttaaatgtcgaagaggacaaggctaggttggcacaaatggagaaggatgactttaaagtgggcgaactatactaaaatatcacgtgcggaaatctgatatatttgtttttttttctttcttttggttacgctttgtaaatagatatcctatatggagttgttagaatactactaaattaacactattaaggtaaaattatgagcacgaagaaagtgccttcgaggttaaataaatacattattaccaattaatattaagatcgtatacttcattatgcttacatggtatgggtttttatttaacttgtctatatgtgttaagaaattttctgaagatatcctttagtaaatagaatatctttaaattgctgtgaatattaaataataatggcggatggaggtacaaaaggtattgttttgaagtaccatcataattttgtaaattgtcgaaaacttttgagaatagtcttcatcaaacgaagagtacttttttgtcagtctactgggattttgaaatcaaacaaaaaaagcgtctccttaaacaccagcttcgaagtccttttgagccatgaaaatggataaatcaaccactcttgaagagtaaccatattcattatcataccaagaaaggaccttgaaaaaatggtcgttcaattcaataccggccttggcatcaacaatagatgaacgtgaatcggatgtgaagtcagaggacacaacggcgtctttggtaacacccaaaacacccttcatatcgctgcgagatctttgttctagggccttcataatgtcatcgtaagaagttttctttgctgtacggaatgtcaagtcaaccagggaaatattaattgttgggactcttatagacataccggtgatcttaccattaagttcaggcaagattttccctacagccttagctgcaccagtagatgaaggaatgatatttccctggcaagatctaccgcctctccagtccttaccaccagaactggtaccatcgacagtcttttgagaagcagtagttgcatgaatagttgtcatcaaggcttcttcgataccgaactcatcgtccaaagccttaaccaacggagccaaacagttggtagtacaggaggcattagagaccacgtgatccgtcaatgggttgtatttaacgtggttaacaccatagacgtacattggcgcggtctttgatggagcagtaatgataacttttttgacacctttatgtctagaggctgtatcgacttccttgaagacaccggttgagtcaattacataatcgacgttgtaggaagcccatgggatacgctctggttccctaaaatgagatagagggatatgagccgaaacatggtcattttgaatgatgatacgttcatcgtcgaattcaacttcaccacgatacttgccgtgagtagaatcgtatttgaacaaataagcagcgtattctggtgttgtggatggattattgattaatctgaccttaacttctgggtgcgtcaaagcagcacgtagaaccaatctaccgattctaccaaaaccattgataccaatgttaatttgagctggcttagaagaagattcgtttgtcatatcgggcatctaaaaaagtgacagtatcaattctgtgagattttaaaaggtccggtttaaagaaaaaaagtaacttttctctcaaataataataatagcggtaatatgtgccagtaaatattagaaaataaagaagttttctaatgtcaatgttattaaatcacaagtggatgacctagcgtagcagtaccagtaagatctttatttcttaaaaaaggtaaaaagaagaaaacggtgatgcgaaagcagtgaaagcagagcagacagcggttaattagatatgattatctctggatttgtataatttaaggaaaccatcaaccaaaaaaaaaaacaccagtcgtttaccggttagatgatttcgtcttaaattgcccatggcatgtacatcccatatttatatatacttgaggataacagataaatgaatgaaatagaagccatagagaaaccccggaagaatgtttcaaactggtctaaatatttgaaaggttgaaattccaacctgcttctctgtggcagaggaacgttgagaaaaaaacacaagacaagtaaataaaaaggtcaaattcacaacaaaaaaacgccagaaaaactacgtaaaatgaaaggctttttttcgctgctgcttccgtgcgattttctacgccaatccctattgaataatactaggacagcgaagcatcggtcggttattgattgcttctatgtggctgtctgccctatcttgagtcacgaatcagagacaaggggaaaccactacatcaattagacgccagataagaatagagacagacgctttaatgagcttactggccaataggaagcgtttttggtcatcagattgtatgcctattatgttgtccggtctctggtagataatgtcataagtatgccgaagctttagtatgaaaaaatactgaaaaaactccggggttcgtgacagttttttagggacaaaaaagtcctaccggagcaaattggaagagacagacaatttggccctgaaacaattcggagtttcaagaaaagagggaaaaacagagaaacgcataaagagcagacatgatttggtaatagttccggggtgaggggcacagtagatactgcagataaaagggtcttcttcttatcctcctttcttagatatgtacatagatatacctttatcgaatctgcctagagaacccgggggagctgtgaaagcgatgttttccgggcaggggctggtgcttttgagaacggttcagagtcgggcttggaaccgaatcttccgggtactgaattcttggaaggttcggaagaggaagaagcacacacgtgactcaaaacttgtagcgccagtctattgctcgcttcccagacagctcttgtgctgctagctatatggggggtgatggtgttataatggcaatcctcagataaccattgttctacaattggctcatcgtgaaacacgtccattgctacatgtctaactctgccgggttcttgtgccataatatgctgtaatgcatcatcgtcgattattgagcctcttccgacgttacagataacaacgccgaacttgcatcttgacagaaaagttttgttgatcatgtgatgtgttgatgcatttcctggtagacatattacaatgcaatcaaacgtttcaaggcatggactgcttccatgcgcatcctgaaaatcagactcaagtagctcagagattggatggaattgccacttctggatataagtgtccgagcttatttgttcttttgtaaccggatttctctgcgtgtaatgtatttccattcctaatccggaatccaatttcctaccacactggattccaatacgtccaagtcccataatgagacatctcttgttccgacaactttcattaaaggttcctcgtttccatctgtgcccaaattcgaaccttggtgaattgttttcaccgtgttccagtacgatttctgaacgagccttgatagtgtttcttgctgatctcaatgcatgtgcctgacttgagaatttccgaaacccatctagaacgtgccagaggacgcaatctgcaacgtcgttggctacaattccagagtcctgtatcatgtcgtcataattgtacagttgaatgcccttttcccgtagtgacttcaggtcgagccaattgtaacctacagaacacagacatatgcacttgatcgacccaggccaacgatgatcatccaagatttctgcactcaaaccacctaagggagcgaattgtggataccctccaaatattccgacaattggacccttttgcttcgaatgctggtccaagaaagttagaaatgcttccttaccagtgccatcaacatctcgttcaagtgtgtaattaaccgtgttgaactctttttgcaaaagcttatattcctgtaaactgtattcaggttcagctatgaatagtatccatggcctgtccatcgtgaaacgaagtttgggacaaatgagggaatatggttttgtgtataaactttgcagtgaagggatccgagtttttctctgccaacccaggatcgtctttgttataattaatattgaaacctccgttcacagatctgggtcacgtgaagaaaacttcagtcactattttacgatattggttgaactgacatactacctttcgaggtgctgaacattcctggatcttcagcaatttatgagcatctgaaattgtccaactagtttgttaacgctcgagatcaatgcctgaactgaatgcagttatatgcgtctagaacgtttgtcttttaaccttgaattagtgttgaaaataaagaaagtgcgattgttacaataaaaataacaataatagggaggatcatagtatttagcaagaaaacaataacgacttcaaacgtagggctaccttcaactagataggaaacgttggacctagttcatagaacgtcgaattgacaaaagcttgtaataatggacgaaaattatgatgttatcgtccttgggacaggtcttaccgagtgtatattatctggcttactctcaatcgaggggaaaaaagtcttacatgttgacagacaggaccattatggtggtgaatcatccagtgtcacattaacgcaactatactctaaattcaaacaacatcctttgagtaaggaagacattgagtcaaagtttggcaaggatagagattggaacgtggatttgattcctaagttcttgatggcgaatggtgaattgactaacattttggttcatactgacgtcaccagatatatcgagttcaagcaagttgctggctcgtacgtttacaacagaggtaaagtatataaagttcctgctaacgaaatggaggctatttcatcttctttattgggtatcttcgagaaaagaaggatgaagaagttcttggaatggatcagtgcatacaatgaagaagatatcgccacacatcagggcttaaacttggatcaaaacactatggatgaggtatactacaaatttggcttaggaaattcaaccagagaatttattggacacgcaatggccctttggaccaatgacgattatctgcaacaacctgctagaccatcagtggaaagaattatcctatatgtgcaatcgatttccaggtttggtaaatctccatatatttaccctatgtatgggttgggcgaattgcctcaaggatttgctagattatcagctatttacggtgggacatacatgctaaataccccaattgaaaaggttttatactcagacgatggtaaattcgaaggtattgtcaccaaagaaggtactgcaaaagcaccaatagtcatcgcagatccaacatacttccctgagaaatgtaaaactacaggtgaaaaggtgatcagagcaatttgcatcactaaacaacctgttcctaacactagtaatgctgattcttgccaaataattataccacaatcacaagttggaagaaagaacgacatttatattgctactgtctctgacgcccataaagttacttcgaagggtcattacctcgccagtgtatcaaccatcattgaaactgataaacctcatatcgaattagagccggctttcaaaatgttgggcccaattgaggagaggttcatgggtatttcagaaatctttgaaccgatcgaagatggcactaaagacaacatttacatctctaaatcttacgattcctcatctcacttcgaatccatgaccgacgatgtcaaggatatctactttaggattactggtcacccccttgttttaaagaagagagaagatgttgcagaggagtaagtgagaactacgagataaccgtgatgctaacttttgaaaatatcgtaccttcacgtacttctacgtacttttacgttactttcttgtttcgttacaatctttatcattatcattttatttttgtctatttactatctagccccacatattagcttgaatgttttggcaatagttttatttcagcaatcgacgtaaaaatatcccagctagtcctcttaagtccagcagcttctctacttctacatatgaagttgtgtatgtcaattttgtacatgtatcttttttttttccttcaacatgaaattgtttaaaacaatttcatgttgaaatttgacaatacaactacaacacattcaaaagtcaaatgcatggacctctgaaccaaggccgtactgtccagaaccatgctattattttcatttttcaagaccctggttgatcatgaagtcaaagtcgaactaaagaacggtattgaactaacaggtactctaaaatcagtcgaccaatttttgaacttaaaattagacaacatttcgtccaacaataatgaaaaatatccacatctatcaagcgtgaggaacatgttcatcagaggttctactgtgaggtatgtacatttgaagaaatctatggtggataccaacctacttcaagatgcaaccagaagagaattaatgagtgaaagaaagtaaacgaaagaagcagcgaaaaacagggttcctgctgcagaaaggaataatttataactgttaaatatcattcgagtctaccactctcacactattcacatatgtaataatagaacacattacctatcatggtggaactcccaagagtttcttctcacattttgatcggaggtgtccagtttcattgcaataagaacatttaatgttgttagctttagactttcgttttccaaatttggcttgtttaggagttctttgtactggaattagagcatattcttgaccgtctttctgaataatctcaatttgtttcgaaatcatttttgagaacttctctttatccagttcaacggatgtaatcatcgagatgagctcatcaacgttcttcagtttgttctcgtattcctcttttaaagacgggagagtcgactgctttttttgggactgagataacactagtttggctagttgatcaagcgcctcagactgtttaataatcttgtctgcatccgccatgatagagcttgtggtcactggggttatccgataccacacttcctactctggtggtcctgaatttgatcctatctctctatcgttcttttttcacttagattccatagtgaaagtgaaaataaaaaacgacatcggacagggacggatgtgaccccgtgagaagaggtggagtcgcatttccttacgactatatgctcatttcaacatacgagatatacatatataccatgcaactatttttaggttgatttgtcttactatcacaaacttttctttgttcttgaacagaactgccctttacgaggcgtaattaatagtttgcgattccaatttcacatcagcagggttcggagccgcctcatacactgcaacaattggaactcctgaatttcttagtttccctgtcgcttcacctcttaactcacagaaatataatctattaaggtcatcctcatcacccgaccagttatccttcactaagacagtcaagttctcacaattctggaagatattccttggcaagtcaaacttgataaatgtgtcatcatcaaataatgattcattattataatctggttcaataccgacgttgtctggaaactcgacggtgtactccgccttcagatcgtttatggtatcaaagtccaaattcttattgtagttcttatacaactgaatgtgtcttggtgtactataccctgatccacccttgttaactcgtaatataattgcaaatattttaacagatgcagtaaagggaatctgaagtaacacttgacagtctgcgtctgactctaagtaaagggaagtattatacttctcatcttgcggcttcaaaaagctttttgaaaccaaacttgacctatcattgctaactccattcaggacttgtacttttgtcatgtcaatatgtgtatatagggactggttagagaacgtttctgcaggtggttcatgagaatgtccatgatcgtggttatgaccatgtccgtgatcatcgccatgactgtgaccgtggtcatggttatgagaatgcaactcgtcttcacaactgaagcctgacattgtggttatatagacagataacttttgctcttgttattctattctggccattacattcactttttaaaccatcctatctcatctcatcaaatcacatgaaattcttactattaaataccttaatctgtaaatgagagttacaggagaaataagggtatagacataaaagctaaactgagatacgtataattagaaacaaaaacactcaatgttacctgatccttttttagaatacccccgtaagcatttcgtgttctgatacccgtcggtctggcatctatcgttaagtacttcggcagatccataatatgaataaattcattatccaatacaacaaaaaataactaacacaattcaaaagttctatagtttgaagaaccaaaccaccagcaacctaaataaaataaagacggcagcctgtgtgcaagtgcatttttgaatacctaaactgtatttactcataaagaaccaacttaaaacatgccaagcacgtgatacaaaaataaaggattcttactagtcattcccaaaaaaaaaagaaatttccgagcctatctgaaaaaggtttataagtaactcagtcccaatatccgcatcaaaagcagcaacatttcttttactgaaggtgtattctgtccagatccgaagagggaagcaccgccctaaagatagtacattcacttgtgtacatacatccaaaccaaaatggtccatgttgctagattcttggacgaacgtcctaccgatattccttctattcttgccggtggttataaccatcctttattgagagaatggcagaatgagagacagttaacaaagaatatgttcatcttcccgttgttcgttagtgatcaggatgatgaggaaactattataccatcattgccaaatatcaagagatttggtattaacagattaaaagattatgtcgccgggttggttgccaagggtctacgttctgttattttattcggagtgcctttgaaggacggagctaaggaccaagttgctacttctgctgatgatccagaaggacctgtaatccaagctatcaagttacttcgtaaagaattccctgatttgtacattatctgcgatgtttgtttgtgtgaatacactagccatggccattgtggtgtcttgtatgaagatggcaccattaacagagaaaaatcggttcaaagaattgctgccgttgctgtcaattatgccattgctggtgctcattgtgtggcgccaagtgatatgattgatggtaggatcagagagattaagatgggattgatcgagcatggattggctcataagacctttgtgatgagttattccgctaaattcagtggtaacttgtatggtccattcagagatgccgcttgttctcaaccaggaaaaggtgatcgtaagtgctatcaattgccttcaggaggtcgtggcctagctagacgtgctttaaagagagatttgcaagaaggatcagatggtatcatcgtcaaaccttctactttctatttggatgtgatgtccgatgcagctgaaatctgtcgcgacctcccagtgtgtgcttaccatgtcagtggtgaatacgctatgttacatgctgctgcagagaagggtgttgttgatttgaaaagtattgcctttgaatcgcactatgggttcctcagagctggtgctcgcttaatcatcagttacttcactccagaatttttggaatggcttgacgaaaattgaaaaaagaagccactcactcatctacgaatcataactccatacctttattcatattctaatgaccatggcatgttctaggacacaatcttttgttattttcttctttcctcatagccctctttcctattgcgaaatcataatacgcactgcctaattaaagggtacatgccaaagtataatttcccattcctgtaaatctaaatgtaaaatggtttgtatatattattaattaattgaatgaatgaaataatacagaaacttcaacaaccagctagaaatgcaagacgcaaaatactgttgtattcacaaagacgaacttagagcattctattttccatactatttcctttctaattcatgctaatagtggttcttcttttggagtttccttttgggactctccattttccttttctggttccgaagccttgagttctcccaattcctttgttgatgggagttgatccagtctatcttgcacaccaggtgcagtctccttggtaccgttaacctcacggtctaactgttccaattctctatcaacttcatcatttatcgtagatccgacaaccgcgtttgataaagcatcgtctatctctctttgaatttctatctgttctgcagcagtatccataatactctctactttctctagattcaactcaacgttaagcttctttaacaattgatttcccttctgtagtccatcgataaatttcttttctattagtttaaattcaatggattggaccattgtctccaaatttattatctgatcagaacactgttccaataatcgttcctgataatgtatccgctttaacaacaatctcgcacgattatcctgtttcaattgcttccccttaagtttaatgcaaagagtccttaactcagctctttcgacccctatcaaattttcagtacgacgagaatatctatgtaactcatctttagccatcttcagttgcaacattgccttatcggactctgtaacttttattcgacttccttgttgtcccatctcgtgaatatatgtgcttgtttttatactaccaaaagtactaacaagtgtagctattgaactaccactttcgattccgttactaactccaaacccttctccaatatcaaaaagtcgtttgacaataagtcttcaactgttgggctttcctcatagatgcatagaatggatattcactgtatcgataacgcataatggacctttggatcgacataaagatttcaagatagtatatttaaatattacccagacaaagtcacatgcaacccatttgccagaaaaagatgaaatagtattcaagtcacgtgaaattacacagaacactgcttgtaaaagaccgctctgggcggtcgcaagcacaacaacatgaaatcaagccgcaagaagttagccagccgcctacttcgtagttaaagggtttttgacatattctcgagatgaatcatgtcaactatacgatcatttgtagttgaacactatcatacacacttgttcggttgtgttgtcttgtatgctacattttctggtgggataaggacagcatcttaagctgaagacaccaagatgactaactaagcgtaaacggcttttctatgcgtgtttaacccaaagcacttgaatatttcaggtgaatcgtactactctgcaaggatgaaccgcaatatgatcccaaagacgaatcgaacctactgtcccttgtcggattattaactgatcagtcacaatgaatatgcatcatcttacatataaaactttttgtttctttccacttttctctgcgaaaaagctttgaaaaattgtaaaaagtaaagtgaggcgatagtaagaattagaattgacttcttgttaacctagccatgtcatgagacaaagttattgatcaattataagttgataaataacgaggccctccatagctttttcatcacaaatttaatcgactggtaatactattaaatcggttagcggtgcctacgtttgattctattgtttctaccggtttatcattaataattagtaaggacttttgaaagtaaaaagccttaccacaaggaagaactaaaaatcaaatctccaaatatgggttacgatactcgccatgatgttatcgacttagtcggcaacactcctttaattcgcttgcaaaaattgccaaaggcaattggtatcaaacctaaggtctatgccaagttagagttgtacaacccaggtggttccatcaaggaccgtattgctaagtccatgatcgaagctgctgaagaagaaggtatcattcatccatccagatccactttgattgaaccaacttccggtaacaccggtattggtttggctttgatcggtgccattaagggttacagaactatcattactctacctgaaaagatgtctaacgaaaaggtttctgtcttgaaggctctaggtgctgaaattatcagaactccaactgctgctgcctgggattctccagaatctcatatcggtgttgccttacgtttagaaaaggaaattccaggtggtatcatcttggatcaatacaataacatgaagaatccagaagctcactacttcggtactggtaaggaaatccaccaccaattggaagatttatctttgttctccaagttgaaagctgttgtcgctggtgctggtacaggtggtactatctccggtatctcgaaatatatcaaggaacagaacgacaaaattgccattgtcggcgctgatcctgttggttccattttggctgtcccagaaaaattaaacgaaaccgatgtcactgaatacaaggtagaaggtattggttacgattttgttccaaaggttttgaaccgtgattctgttgaccattgggtcaagactgatgacaaatcctctttcaaatatgctcgtcaattgatctccaacgaaggtgttctagttggtggtagtagtggtagtgcatttactgctttggttgattactgtaacgaacatccagaattgactgaagatgatgttatcgtcgttatcttcccagattccgtcagatcctacttgactaagttcgtcgatgatgaatggctaaagaccaacggcctatgggatgatgccattgccactccaattgtgcaaaaagaaaccgatgtttttgaagatgccaccgtgaaggatttgaacttgaaaccagtggtctctgttgaagaagacgcttctgttgctactgtcatcaagattttaagagataactcgttcgatcaactacctgtgttaacaaaggatggaaagttgtgcggtttggtaactttgtctcaattattaaagaaattatccacttccaaggatgtttctagcattaaaagtctgttctttgatttccgtaagttgaataactttgatgacatctcttcctataacgccgacaagtctcataagaagatatttgttcgtttcgatgtcaatacaactttgtctgagttgaactctttctttgaaaagaactcagcagctatcattactgagggtctgaacccagtccatattgtcacaaaggtggatttattatcttacttggccaaataaaaaaaggatatttcattaaactaagaatcatgtccaaagtgcaaggtatatttccacttacattcaatatatcacaaccccaagccaatcaatcctgcaatgaaataatttcataaaatatacatatttgttgtaaaagtatagtatagatatctattgacataaagtatacaaacagacagtctattatcaacatgcctgatgattcttccagtgaataatcaggaagtgagatgcaggaagtcattgaacaatattacttcttttcgattcctagaactttcatcaaaggccctagttggtcaggacccaaatttatgccagatttgtccatctctgatttgaatttctgcatagcttctctaatatccttatccatcataagctttaccatctgcatgatacttggaggttcattcgattctggatcaattaacttcttttctcgcatgatactgttaagattttccaaggattccacaatagatggatgggaatgaatctcgtccataagtttctgtactttgacatgagcatccagatcctcgggtgatttgtcccatgacgaagcatatctcttgttttgtagaagaggaatgattgttctacaacttctttgagcagtaactgctccaaatgtggcagctcttagcccagaacggaatacagaacgcgataacatgttttctatatgaggattattgaagttccacagcaacaggaccggttaggtctcggatattctatattttcttaatttagtatgcaagcggaaagataattgcgctttcacatttttttgaagttgataaaatttcagaccttaacatgatggactgttatcgaacaggagtctgaaggtaataattgaaggtgagcaccgactattttcatttgagcttgcaatatataaacaaatcgaactacaatgaattcaacaccatctgtagagtatttaccatagatacgattcttaattgtgatattacaactttggtcatttatacatgaaatactagttagccggaagaatgtatgatgtagaattggcggatgctatgtgtacacatctagctagcaatgaaataacgaaagagttttagtgcttgatcactgccatcatcatgctgctttagtgtatcatatgccaaggctatcttcgtaaaattcaaagtgagaatttcaactacgagaacttccatctattaccgcaattctcacatgtacaaaaagtagtaagaggttcatccgcagatcttgtttgtagttggtagtatgatacttttctttgtttacatttgccacattggaatctatctgttactgatctttctacagttgcaccttgtgcattaaacaaattctgtttctcaatttcctcaattttcttctttaaatgttccggtgccaagtccttaggatcagcagtcactaaatgtttggctgatacttctccattcgtaattctatgtttcaaatctggattgttcttggagattatatttgagtaaattattctgtatttgtcacgatatcccttttcgtcagactcgggattgaacagattagccatttctgtctcaatactcattactgtatctaggatagctactggaggatgttcactttcttttgccaatgcatcatataatgccctaatagccatatctctaatcttgacaccatatatatccgttttcacaccgtcgttcttagcatttcttggagctttgctgacatatttctccttctttactgcttctccaccgcttgtaccattattgttacttgtagatgaggaattgctgcttagtttgcttttcttttcacgagccacagcatctttccaggataaaatcatcttcttcaccaatttgacgatgtctggattggaagatttcttaaattggttgactacgacccctactttcgtctctctaagaagcttctcattaacatctttcaaatctttatctaatgactgtagaatcttgaacacaacatcattattatttttgttcttctctaatcctttgacggcttctaaaacgtccttggtttccatatccgcagaagatatctcagtttctatctatattccaggatcaatttctttcgaagatgaagaatgaatgttaataatacacagcaaatattgctctcaacagattctaatgagttaggacctgctgaaatccaccatttggacaatggacagtgttgattgtttgaagtcattaattagttttcaattctaatttcatttcattcgaacattgaaaaaaaaattagaattgaagttgatgacgaaagttgaagaatcgaacaataaagccatatctgagttttattacacttataaagtaccgctaagagcatcgaaggacttgtaagacagacttccaccagacagctagctgtgaaaataacctggtgcaaccaatttcaatcatagaaatagttaaaaagcaatgaacaggggaaatccatcgcgcacagtttatttaggttcgataccgtatgaccaaacagaacaacaaatattagacctatgtcagacgataggaccagtaacggcaatgaagatgatgtttgacccaacgacgggtaaatctaagggttatgcttttattgaattcaaagatttggcaacttcggcaagtgcagttagaaacttgaacgggtatacattgggttcaagatcgttaaagtgcggatacaccaccggtagtggcataaacggcagcggatctggccccggagatgaagaggagaatggaaacatggttgaggatgtgaagttcccatggctcccggtaggggtggacgttaacatcaatatgactacaccagcaatgtgtatcagtagtgaattggggaagctacaaaaggaccaacagatggctctactaaaagtaatccaacatttctgtaaagacgacaaggaaactttcgtagcactcctagaagaggcacctcaattgagctatgctattgcggaactcctgttgagtaacggtgtgtgcagtgtggaccaattgacacaattggctatggcgagtaaacaaaggccagaggaacagactgataacacagtggaagacggattagacgaagagaaagtggatcttctaaggcaagttctacagctacaggattcagatatagcaatgcttccgcaagacgaaaagatggcagtttgggaactcaaacagagggcaatgaaaggtgaattcggtcatctttaatagatcgtctcatggatggaaaatcaaaaataatgaacatgcgtcaactataaagttcattaatgcttatagatgaaacggtgtagaatgtacaaattgaatacgcactttcggatgaagtaaagttcagtctctaaaatataccttcaatgagccagaatgcgcttgacggtaagacagaagtagcagtataattttatggaaataatgaagagaagggttaataaccaagcttactccacgtatgcagtatctattcaaattaattaactctgtaaagtcacgtgtatcagctccaagaaaatgaaattaactagcgtctaccctattaacatttgtgaaaacttcaacccagaatgagctgaaagacactaaggtggaggctttaacggataagaagagtactcatgtgtggaaagcaataatccgagtcaagtatagcacaattttttcaagttaatcgtcaatgatatccatctgatgatgatgctgctgctgtaaaatgacaactgccgcaaacatcgtttctctgccaccaagtttgtgacaaatgaataagctttctcagccttgcttcatatgtagcaaggctaaaggaaatacaaccgtccatagcggactaggccatgaaccagttaccatcgagatttttaagcaaccagaaaaataagtgttcttattcgaatggcatatttctctggcagccgtaaagtctcacgaaagacacagacacagaaacttcatagccaaaaaaaaaaattaatttacaactagcttcagcagtgaacctaaccttaatttcgtgcaggtacggtcaaggggtcctgtttatcgaattatctttctacggaggtataagcgtcgaacctttgtgattgttgttcggaaataggtttgtgtgattgtgtttagtaacctatttggatgtctttgatattcgaagataccccaaattcggtcgttacggttccttccagtatcataactcgatgatagtgacttttgttcctttcgattctgccagttcctcgtgacattataaagcttttatggtttaattcgacatccgtaaggtatttcctttgaagtctttcgaagactctttcgatcgaatggtttacgcttcttattccggtacaagggcctgaaatatgacttcgaccctaacaacacttccaaattacactgttaatttccattcgccatgttttaatatgtcatacgaagttgattaagaacccaagagtatataaatgatgaacagacaccactaatttcttcatcggcttgagttcagtttgttttgagatgtgattggatctggtatttaagatagagtttcacacatagaaactacaaaccgcaagtgggtaactgttcattttaagttcaacaatggtggattttgaaaaacagagggttgactcggatgtgaaaaggatttcactatccagttatgatgttgaattacgttctcaggattcattggatagtgataatccgtttagtgatcccctgatcgccgaatattatcgtgcactatatgaagaaagcaaatacgagagtagaagcgcatttgatccggcgttcacatggacaaaggaagaggagaagaaattgctttggaagttgaacttcagagttgcatttgtggcatgttttttgtttattgctcttcaattggaccgtggtaatttatctcaggcagtggccgacaatcttcttgaagatttacacatggataccaatgactttaatttgggtaaccaattgttctacctctcctttttccttgcagaattgccttctcagttgatttccaaaagattgggtcctgatattttcattcccattcaaatttgtgcttggtccgtcgttgccatggcgcaggctgctatgcataataaagcagggtttttgatctgcagatgtttgattggagctctcgagggtggatttattgctgaccttgttttatggctaacttacttcttcactagtaaagaactttcaatcaggttatcatggttctggactagtttatcaatcgttcaagttgtgagtgctttactggcgtacggtattttaagaatgagaggcatcggtggtcttgctggatggcaatacttgttcttgctagaaggaattttaaccttcctcattggtctttccggtttttatctaatggtccctggcgccgtccaaacgaaaaattggatgcatccaaaggggtggttcacagaaagagaggaaaagattgttgttaacagagttcttagagatgatccatctaaaggtgacatgcataatagacaaccgatctctttcaagttgctgtggagtgctatctctgattatgatctatggccaatttacttgattgggttgattgcttatgtcccaatgaacactgtatcgacatatctaacattaacactaaaatctgtgggattcagcactttgaatgtgcagctactttctattccataccaagttatccacattactcttctcattggagttacttggtacgcagaaagaattgaccaaagagcgtacatgggagttatcgcttcgatttggaatgccttgttccttggtgttctaagatggtggaagggatccctagttgaggcatggcctacattcgcgttgtgtacattattactgggtggtccatacgtgcatgcaatctgtgttagttgggtctctagaaactccaattctatcaaaactagagctttgagttctgcattgtataatatggccgttcaagtaggtgcaatttattccactcaaatctacagaaaaaatgatgcaccgttgtatcataccggtaacaccgttctatttgcgatatccattgcaggtattccggttttcctctttgcgaaatggtattaccgcacaagaaacaagcgaaaggaagctatctggagccaaatgtccgaggacgaacgtgtcgaatatatccaaacgaccagcgaccaagcaaataaaagattagattttagatttgctgagtgaatttcgtgaactgtattatttgttacttttgtttacaatgtgcacggcatgaattccctgtatactacatgcatatataccagaactttgatctttaatctataaaagttttaactacaacattgtttaattcattatgaaaactcttttttaaccacatttcccggcttgcttcatccctttttctacatcgacactgaagaatagtagtagagccaccaaatataataatgtgttcggaatgaatggcatcctggagttccctgtcttatcttgaagtaaagcaacaatcaaagattcagaccaaccagtacataaaccaagcattacttcaaagccaaaatattggttttctttacctgtaggtaacattgcactatatgcaacgcggttgattgttctgataccagaacttgtgctaacgaacaaaatctgaaataaccagaattcccatcgatatttaaagccaaccttactattgaagttagttcctagacatccccaaaaattggtgaatgttcccactaacaacatcccatacaatgatcgtttcatgtacgtgatgctgtagaagcttggtttgttgctgcaggcgtacgagtaaaatgccatccaacataatggccctaaacaggcaactattaggttcataaattgccaaatggcaaactcagcatccgatgaaccgattcccatggtcgatctgaagagtaatccgaataccgagagaaaattcgaatacgcaatattccaaagtacccaagcaacacagaatttgaatgcttctctgtaatccaataaatccataaaaatttctttgaatctaaccaatggcattattatcaaatctctcacacctttattctggaattcttttcctttcaagctcggtattaggtttgcacatataattgatataaatgtagtgacgaatcctgcaacagtcactgccaatagaaagtccttgtttgaaggatgagaagatgcatgggtaataataactccaactaaagaagcgataattcccccaatatttccaacaacaagaccccaggtgctgacgttaacacctcgcaacatgaccccaccttgttttgaattgtgctcatcttgtaaagcaagttttcttgcattcataaagacaggaatgtatgagctttcagtgatttggtatattgtaccaaagcaaagcataagacaatacaacactgattgctggactaaggtttgatattttttagtatcggataaccagtagaatggaatagcaaagataccatacgatgccgttgcgccaatcattagccattttctatagtccgaataatcagcgaaggccatcattaaaattgcaatcgcaccttctaaagacgtataaatggcctttaagtagagagaaaaagacgtgtattgaactgttccgtaactaaaagtaacataacagtcgtcccctgtggctaaacagggaccagatgaaccttttggatgacctaacgcatgtgctgttgtttgtatcgttgcagggacatacgatctcatcatcgcagccgtaggacctgtagaaaagcagattaatagccaaacaaggtaagtcttcctggtatcccacttggatagttgagagtctttgaaattgcatgatgcagacgaaatctgttcttgttggaatgtctcatcatgttcacacacaagctcttgtactgaagcatcagctgtcagttttttggagcctgacagagtagaacagccggtgctattcggtttgagaggtgtactttccagcatttcattcatatcaaagtactatttcgctgtgacaatactatatcaagtccaaaggtcattcggggaaaaatgtctgacgcgaacaacccatatactcaagttgaccatttatttatattcaaagaaaaaactgcttttcatatccactcaacaagtaacatttcctagttgtgataaagcagcaacaatgatcttggtaatatactaaattttgaaacgcaactgggacttttgagtgcattcttcgatattaaagattagtaccaaataataattgctcacgagtgaataagaatatttcaagagataaaaagtgcacaaaacacaagcctgagatgaagcccaaaaaactaatcaactaaccaattaaaacttgtagtgagcaatgtcactgtactctaccagctcctgattttacctaacacattcatttaaatcatgtgtcaattgattagttcaaatgtcaagtgaagcaaagaattctgtcgcgtgtcaaaagttggcgagtcagttaatttcatgtcaacaaaatgaaacacttacgcacgtgattggcaaatagatcgcagcagcttcagtacattagtccagcgagccaaaaaaacctcaatcgagtaattctttgcctggcatctacacatcacgtgacttaaatcgatactatcgaaaacataactccttcctacaaaccgccgcactgtcgaggagagcgtgatcaaatagcgaaactatttcatgaccgtttctgtcgaactttctggaaaaatgaaaaaaaaaatgaaaataatgtgagcggccataaggcatcattcaaaacgatgtacagctcctgattctccaggcgaaaagccaaatccaaaaaaactggacatccaaatgtctataacaaaaatggacgaatgacggttatattaggtaaaaataattcagttaggtaatggtggtgaatagcgaactcggagaaactgccagaaaaaaataatcgacaatagcggaacctgcctcacgattacagaagaggatagaactcttgtgtgtatataggaattttaattaactctttgactacttttttttggaattaattagctggcagaaaatgaaagaattctatgggctcgcagtggagttcagcaatgcggacatggctggctgctatctagtaagagttaacccaactattgttcgaatccttattcctatttctcttaaatgtgtaatctgaccggttgatccgcaactttatatgccattttctgtgtagctttctttccaaatttctcgattttatcatcttcattttttagatatttttttcacggaatataaaggaaggagtagaggcgaaaaaaaaaaaggatttataaaggatcaaataattataagattggaaggattactagaagctaagtggttttttgattgattgattgttgtcttctttgtgacattagctgaaggaactagtgatagcaagattttcgaagcaaaagtaacattttccagtaggtggtgtttttttttttttggattctgatttctttacctgttatagattttttaatatacgagaatagtcactatgttgagaagtaccgtaaagccaggcaatttgaccttgaagagaagcactcaattgttgagtcgtcgtctatattcttcgcacaaagaattaaagtttggtgttgaaggtagagctgccttgttaaagggtgttgaaactctagcggaagctgtttctgccactttgggtccaaaaggtagaaacgttttgattgagcaaccatttggcgctccaaagatcaccaaggatggtgttactgttgctagagccattactttggaagataagttcgaaaacatgggtgctaagcttttacaagaagttgcttccaagacaaacgaagctgccggtgacggtaccacttctgccactgtcttaggtaaggccattttcactgaatccgttaagaatgttgcagctggttgtaacccaatggatttgagaagaggtactcaagctgctgtcgaaaaagtaattcaatacttgtcagagaacaagaaagaaatcaccacttctgctgaaatcgctcaagtggcaactatttctgccaacggggatgctcacgttggtaagttgttggcttcagccatggaaaaagttggtaaggaaggtgtcatcactatcagagagggtagaaccttggaagatgaattggaagtcactgaaggtatgagattcgaccgtggtttcatttctccatactttattaccgacgctaaatctggtaaggtggaatttgaaaaacctttgatcttattgagtgaaaagaagatctcctcaatccaggatatcttgccttctttggaattgtcaaaccaaaccagaagaccattgttgatcatcgccgaagatattgatggcgaagctttggctgcttgtattttgaacaagttgagaggtcaagttcaagtttgtgccgttaaagctccaggtttcggtgataacaggaagaacaccttgggcgatattgccatcttgtctggtggtactgtcttcactgaagaattggacctaaagccagaaaacgctaccatccaacatttgggttcttgtgattctgtttctattaccaaggaagataccgttatcttgaatggtaacggtccaaaagaaaacatcgaaaccagaattgaacaaatcaagaactctattgacttgaccactaccaactcttacgaaaaggaaaagttgcaagaacgtttagctaagttgtccggcggtgttgccgtcattagagtcggtggttcttccgaagtcgaagtcggcgaaaagaaggaccgttacgatgacgctttgaacgctacaagagctgctgtcgaagaaggtatcttgccaggtggtggtactgctttgctaaaggcttctagagtcttggacgaagtcgcaacagaaaactttgaccaaaagttgggtgttgacatcatcagaaaggccatttccagaccagctagaaagatcatcgagaacgctggtgaagaaggctccgttatcgtcggtaagattatcgatgaatacggccaagactttaccaagggttacaatgcagccaagggtgaatacaccgacatgttggctgctggtattatcgatccattcaaggttgtcagaagcggtctagtagacgctgctggtgttgcttctctattggctaccactgaagttgctatcgttgatgctccaaagccagctggtgctgctccagctatgccaggtggtatgccaggtatgccaggcatgatgtaaagtggaacaattacttgaaaacttgaaaagtgaaacagatcaaagaaaacaaccgtcaaaaaatgttagaattacaagaatttttactgaacattagctttttcacctaaaatacattccacttttatttaaatgaatatataacgtacgtataatgacgatcccgtgtaaataaaaagatacttctacatgtttaaatagtttcctcatcatcaacccgcttttcaacacttcctctgtccttgacaggatggctagcattctccagaaggtacagagaaaaaggaaaaagcagagtgaaaagaaaaaaatttggggcgagctgggaattgaacccagggcctctcgcatgctttgcagtagttaaacctcgtttatcgaagcttcgctaggctattaacccaaagcgagaatcataccactagaccacacgccctaatttatgaaaactgaaaagcgtcatcttgttacattgaaaatgcagtaccataacttatgagtatgcattacctgattttgccaaaagatgacgtttaaaaattaaggttggattcactgccaactgttaagatcgatgttgaattatcatcaatggcaagcaaacaaagatattccaccaaataaggcacttcaaaataacagttatgaaacgggtattttggttgttatgtccagttttatttttagctccctatgttttgccgatttcacttggaacagctgataaagatggaatactgaacgtatattttgttaagtttggttggttttggacatcggtaatatcatgcttatgtgtgataaggtactctaatatagtcaaccattggaaaaggtacctgctattaacgttatggtggatgatatttacccaagaagtatttggattgacgccgctaatggatctagtgttccttaacagcggaggaatttgttcatttgacatatttagtacagatggcaatgaacagacactgaatttgcaattccatgacaatgagtttagaaggcttaggggaatacgaaggatgctaaattggcttggtaatgtgcatggtagtgaaacacttttatctgcgttgaactctattatctcggaagatagttcagagtatactccagaacttgctgctgaattatctgaattatccaaattggtgaagtcaagtgctggttgctcatatgctggaggacactgggttggcggacatgatccaagtggacatatatttttgataacacttatgcttatgttgatgtttggggagttatcattatatcaaagtcgtgcatttagacacttgcaaaatacttataaaagatttttgaaccgggcaggtagtcagttattacaacttctagataatagtgcattggctaatttatggattcatgatgatcatgatgatgattcacaatggtggttcaagtttctctttcaacctccattgtcatgttaccagaccttaatgaccttaatatatctgattctgaggtttataatttgggaaaatccgatactattactattcactttaacagcgttgtggtcatactcatttgtagtgacagtaatgctctttcacacattttgggagcagttatccgggtttgttgctgcatatttggtttgcattcttgtgtatcaattcttttaactgatcataatgtcacgtaatatatttcgtttatatacaagttatttacaaagctctagaaatattttggtaatgttcataaatcatcatgtaatgcctcatcaaaaacttcgtttgaagcaaggtcaaacatatcttcaaagtttactccagaatctctccaaatttcattgaaaataagttcgatgtctgcttgttcgactggaggaaaaactggctctaccagtgggctggaacgctgtaaatcgtcagctacaacaatttctgtaggtatgtttcttattggagactgtggattttgcttggtagagtgaagaccgacaattttttctagtattaaacgagttgtccgctcaaaaaggaacatctgtacgaaaggagcacggtttgagacgtattgaaaaaccggtaggagatttggatgccttaattggtcactgcacaatttgaatcctttatagtatgacatgaaggaaattggagttttcggaaggggttcccgattcactacaaaaggttgttcgttcggcattgataaatttcgcgctcaaagccattgaatataggagttcatatccctgcattagagctctgatccaatgcgaagatatagctccgatcaaaaatcttagatttgaagctaacgatgaggactgcatgacattgccgtgagattcttcatagtctaactggtaacattttacgattgaaccgaagaccaagtctgtggacatcatggtatattttccgaaggcgttactgttagaagctgatgtatctttgaaccataatcgtttcaaatttcttagcgtgcaaataatactgagaattgggaaggaaagaaccatttccgctagcggcaagggtctagagagagttttatcggctgcaaagtaatcaatattttcaggccaaatttcgtccaacaaggtttccataaaattcgtgtaaagatccaaatcaggtattttatctctagtatggagaccatttaggattgatctaccgtaaaagataaatttccgtaattttctcataaaggcagctccaaactcttgatttggctcatcagacagaggttcgctttctttccataatgactctgtatcaaacatctctgcagaaaccaaaagtggacgaccaatatcaaaagcaatggtaatgtcatagaagagaatccagttccataagtttttaagtattctttcatcaccctgcaaagcgtcaattgaatcgttcaatccaacatccaaagctgacattaccatcagttctacaacggcaagtaagtgcgaattatcaccaccactttgatgtcttgaggatttccaaatatagtgtagtaaaaggaattgaactcgttcaatatagcagatttttgcagtattctggccaattaacataacgaaaaaactgataaagctatggggcatctgatccttcaaaattgtatataagtgcaacactatcgcaatagggtagtagtttaatttactgtgagggataagctcaatgatacggtcatcaactactttaaaacaatcggtaagatactgcatgattttatcttctgaaaagatattatgaaggtgaaatcctttgtagccgaaagaatgcattaccgcggtacaaagctcagaatactttggaaggtctgatataaccataccgagtgaccaaggagtttcaatcctttgcaattcatataacatcgaagttcctgttcttgccttaagtttcaacctttccttcttatgtaccatgagcacttcttggaaataattagtcacattttcactactcagtctaatgattgttctagtagatgtacaaccataacgaatgatcctatcgtgctttttcatgacatatttacaccgtactaaaggattcgcttctttctttatcaagccgtatatcgacaacctcttcaacgtctctggctctagatgcttctctgtaccctctacctttaattgttgcttcaagctttctatttcatttagtaattgcaagtttgggctcttattgtatacatcatcatgtgagatgtcaaaattatacccatcggtgtaaacacactcagatagacctctcatcttgcacccagtacacatgggacgcttacgatcacacttcaatttacgtttacgacaaaaagtgcatgatttaataactttccttctctttcttactttgccattactcgtgctagcgttcttatcgctataatgttcctcatcgttgttatgactgccgatcccagcgctttcttcagaatttcccgttccaatatcttgtgccgcttcatttttgttataaagaacgctcatttcggtagcaaaatcagatattgcatcgtcattggttgatttcttacaagctgtctgagtctcgttagaattttggccctccaaaggtcctttactcataatgtaaacaaccaaaatggaacaacagaccaacaaatgccccccaagtataaaaagctaatcaacaactatttcttgactgggagaaaaaaaaagatcaatagtacttgaattgttacaacaaatgcattagcaacaataccaatccacctcttaaactgatattggtaacttctgaattatcagccggctctctctgccatcatatataaaaatatgactgaatttgattgaaaaaggtcttttgtacttacttgaaaatataaactaacagaaacaaaaatgacgaaatgcaacaaatcaacaattctacttgtaagacttgcatgaaactcatgtaacgtatgaggtccagaataatatatatataaatttaaagagaccaaacaccgttgtgtagtactgcagtttgcatcgtccttattactgcaaaggaaaaaaaaaggtctggtaaatggccggctggcagcaatataaaattactttttccgtatttactgggatgaaataccaggcttcttgtcatgaaatatttgcatttaatattagtactactggtagtactactggtagtactttcttcagataataattatttaggtgtaatgaaagatgcgctgcagattctaacacaagtgctgcctcaatttccaattccttggtgtgcggttttctgtttcgcgattatgccagatatggtagagaagcgaatctatgctacaatcagggcgtaggaaatctggaaaaaaaaggttcagagccttagcaacaggaacgtagaaacggcatataacagagtgtgagtgaatgtgcctgtaggtgtcctctcatgtgactgacagataaacaggaagccctttgtagtgggggttattggatctgcgtaggtgtacactgtgccaatgttcttttctttggcgatttgaatagcgataattccggaatagttacactatatatggtatcaatactgtatgagtcaatacatttgtcgccttattctgtataccagagattactaatgtatatgaatagtcgaagatcaatgtgcagcagcacattgatcttcttgtctctccctttctgtattcaaggcaagggaaaagtcttatgcggctgggtttagtgggttttggacttgtggaccaaaaataagtaaactgtagtatagaaggattaggtaatttgtgtacgtagtgatatatttgataaaagccatcatgtgagaaagggtggggtcaattgttctatcggttttcagtgatgtgttaagatgataatgtctatttaattggacactttccattggtctaatggcactttgcatagttttatagcagtaggttttaggtaagtagtgaatatgagcaggcctgatacaatgcagaataaattggtgatataatagccatctcttattgtattcagctggccaccaatgctgacgcattgctctttagttagagattggccttgaatgaggggcacgcctgtgcagtcgtacttggagaagaagtcaatcatgctcataatcagcagtctgggccatgtaccaccaaggttgctcaacgtgtttaggagagtcatatacgttcctccgatgactggatctgctacttgggtatggaaagcagacatgctgacgaattggaaggtgctcatgaaggatcccaatagatgttggcacaagactagtaggaaaaatgacatgctgatctcggattcatcttctgggaaaagataaacaacaacgtttccgagaatagcggcagataaacggccaatgaacccgatgatccatggggtcaacgttcttgcatctccagcaacggccctgataattttattattaaaggagtaaccagctcttgataacctggccacgtagaagccgaataagagctcgaaggggaaattgatcaaaactgtaatggctaaatcttcccgtttcaaacctttctcgagcaattttaagttagtagctgcatcgttacactggaatgcaaacttggatattagatgaacaatggctagtgtttgaacgctgggtaatttcatcaccttaatgaataatctgtaaatgttaatcaaatcatggctttcgttgtcttcttcttcatcaggttggtattctatcattttttcgtcgtcatctttcttgatatgggaatgtgtctccacatgtaccttttctgatgtaaataagctcacataaaacgttacagcaagatataacagtccggtaaacgttaaatatgatgataactggaataatctatcgcgatggaagtacttctgcataaattcatcactgcttaaacttaggaaaatggtaaaactcataaaatatccgatgttcaatccgatcgtttgagcagtcgatgcataactcaagctttccttacttaatatgttaagggcccatccatcaacagcaatgtcttgggtggaacacaaaatgaccagaaacaagaacaccgaggtaagagccttcatgtcaacttttgagacatcttttggtaatatcttgtcttttgaaatgcaatatccaagcgtcaataacgttattcctgtaacgaattgaacgggaatgatccacgatctccgacgacctaccttctgggagtaccatgaatcaactatcggtgaccataggattttgaatgagtatggatatgtagccattgaaaacaacccaatggttacgaaggaggtttgtctttgggaggatttcaatatgaatgggatcgttccaaaggttaaccccacaggtatgccttgcaaaagatataataccactaggagatagaattgcttcctatcatgcggaggtaaagccatttttaaaatctgcgaccactgaggactctcaattcctgattattgactcaccctactgattctaaatacaataaccgttgctcgaagcttacagcccacagcccagttttacacctgtctgcctgaatcggctcttatatacatctaattttcaattttgccagattgaaaaaaaaatcgaaggctgtgtatttctgactgagaatacaccctcgacgttataagtcagtttagatacaagcatttcattcattacggatccaaaaattacacatctacggtacttacatatcagatacatatctaaacgcattttctggcaaccaatccgaatatttgaagaaaaataatctcctttgtttcttaacatttcaactgaaaccttctagcgtaactgataggtctctctccttacctattcaattcattccagtagtacgtcaagtacgcattggatggcctaaaagtgcctgattgtgtgtacatgcgtaagtgtttggctaatagttcttagcgaaaaaaaatacttccccataaacgacgaatattctgccatttcaggcaaatagctgcccttatatttgttaacaacttggtaagcttaatttccaatttaagtgttatgaacctctctcctggtccagtcttaaaccctctaatgtatcctacatcgctaaagccatttcagcttagaaagtgtaaaagacaataccttgatggaaataacgacaagttgtacagaaagtagcgcacagcgtcttgttttaacggcagaatatatatatacagtttaatctcataacaaccgcagttgtccccaaataccttattgttcccatctctagtgatgaaaacttttcttcatcattactgatgggcaacatacatgaaaaaaaattgtaaaatctctaattcatcaacttacctttaccagcgaataattcaacgacaggcaactctatctcattctatttcctaatccaaaatcgtgtattaactgaacttggtattcatatcttaataatataatatgttttaatttttctatttttctttgaagtttgtaaatcaattcataacttagtttattgcaacaaaggagtacaatcataagaaaaaccgaatgcgaatgaaccatcatgcactattccttatccaatgaatattctcttttgttttgataaaaaacggaggccaacagaggtgcataactgtcagtaaagaaagagtgcacggtgcaatcattcaatagacaaaacacttttagcagctctgacaatggtgtcagggtctgggaaagcaaaatcttctaattccttagcataaggagttgggacttcagcaccagtaactctttgaattggagcatccaaataatcgaaggcttcagattccataatttgagcgataatttcagcaccaacaccgaaagctgggaaagtagattcaacagtaatcaagtggttggtcttcttgacagtgttgatgatagcttcaacatccaaaggtctaatggctctcaaattgataacttcagcagaaacaccgtattgcttagacaaaatttcagcagcttccaaagagaattgaacatttctggtgtaactgatgatagagatatcagaaccttctctttcaacctttgctttgtatggcaaagtgaaatcagtagacagagattcttcagagacttcgaaagattgaccgtataacaattcgttttccaagaaaacaactgggtttggatcacgaatggcagccttcaacaaacctctagcatcttcagcagagtatggaaccaaaaccttcatacctggaacagaaccgtaccaagcagaataatcttgggaatgttgagcagcaacaccgacagcagaaccgtttggacctctgaaaacgatttgacatttctgagtaccaccggacatatagtaagtcttagcagcggagttaatgacttgatccatagcttgcatggagaagttgaaagacatgaattcaacaattggctttaaacccttcaaagcggcaccaacagccaaaccagtgaaacccatttcggtaattggagtgtcaacaactcttctttcaccgaaacggtccaataaacccttggtaaccttgtaagcaccattatattgagcaacttcttcaccaatgatgaaaacatcatcatcacggtccatttcttcggccatggcagaattcaaagcttctctgacggtcatggtcttggtagaagcaaatctcatggattgaaccacagaaggaacagccctcttaaaagtgttagaaagcatcatcatgttgtattagtatttaataattttgccagttgaaagtttttatcaatcgggtactaacgtttcgtttcactacgtgtaattcttcttaacctttaaaattgtcttcgcttgtaaaacgtttactgaaccaaaggagaatgaatattatactagagtttgatatcttttcgtttttctttttcttttaaaggtagaagaaataatgttttgataattcgaaaacaaaaacgaagcaataaacaaacagacagaagttgttgagatgcgtttgttataagacagacaaattagatagtcaattgtcaattctataactaaaaaggatccttttcaactgaattcttttttataatttcttgaatttgatattattttttcactgaaaaaaaataaaaactcgttctttgacctattcaacaaatagacgttagcctcagggaaccgctaattgagtgggattggatgagaatctgtagtaagatttataaaacctttaagaaattataaagtaagattaaacaagtattgaattacagatccataaagtataaaaaatgaaacacaaaacagaagataatacaatgaataaaggaataacgactctaaagaactaacaacttccctggtgctgaaatgaccctcttatatttctttatatattggtgaaatcaaaatcctttaaaggaatatatatgcgctgcataagcttttttttattcgtttcgactgtacgggtcgagcgattcgcgggttgctataccgttgtatttatctcatagatatgctagcgcatagtaagtgcgccatcacaaatctgctgaaaaaacctgttttggcgacgggagaatacgacatagcagatgagattgatggaggcgatgaggtgtataggtgttcaaacgacggaaaagggtgggggcacgtgatgcgtgggaatgatgcggacattgtcaatttttctgttattccggtgtgatacctaaataatccgggtaacgtaaagcgctgacagatgtcagcgccttagaatgttgttagatggtattattgtgtatatcatcattgaacgacagaggtataaggttcgtcagttgctgagtaacgctgaaatttcaatggatacggcgtcaccacttttactgtgggcagaacagttatgtcttcgggtacccttgacccaattgttcttcctggcggttgttgggcacttgctagtgttaaccgtactttgtttctccccatggttgtcgtgtatagaataccgcattcgtaattggtaggtttttttagtgggctgggaccccatgcagcttgggaaaggttatgactggtgagtagtatccaatctggtcgcttgagtgtattttcatctgtgaattgtatataatatttggtatggcttggaaccatatgcctattcttatcggactgtgtcgcgtttgttggcagagggacatgttttcttaaacaaggcactactttcctctcagtttgttctgatcttttgtaaaaaaaccaatttgcacttagcccctgtgtcatacactctttgatctcggttttagtaggccataccaatgtcgagtgcgctaggaacggtgtcgtatattccttggatttcaattttttatcgtacccatccttttcgaaccaatcggtgtataagtacggtatcataacgtcctgtaggagatcgaatttttttctgaatgggttccccatagaacttacctgtatgaaaagatttacaaatgaaagatcatcatcttcttcatcgccatgcaatttcataccagatgctctcaaacacgacttcaattgtgtcaaaccaccgttatatggggttgagtacacaaattgacaattttgttcgtccaagacatgccatttgtaccgctttaaagatgcaatcaaaccatataatgacgtatacgatgagtacgaattaaggtactccaataattcgtcctcaaaccgggatttctttttcggtactgtttctgacttctcgtataacaggggtgaggtccatactgtctgctgaaccaagttcatctcttcacgagatagattaaatgacggtacatgcattctcatcgtcccattttgatgaaacgagaaaataatcttggaatgatgacaaccccaaggcgagggaatatcaactcgatgcactttcaggtttgcataatgcgatatcggttgttccgaattgattgtgttcaattgacccactatatgaactttaacgtgatctttgatcggggacatgataagattgatttgaaatccaaaggaaaataaccagacttcattcaatgatgggtccgaaagtacatcattcaactcgaacatatctggttgtcttgaatcaccatcgaaaatgacactttttaccactttaaaagggctataaactggtgcggtagcagcaactggcgctgcagttgacacattccgccctgaacctatcgttgttggaacaaccggcttactatcggattttgtccccaaggtagcccaatgagatcgtactgtatctctcacacccatgtcacaagcactcactcaataacttctacggcatataatccaataccaatatgttaattctgccttgaacttcgcaattcatcttccctgcaactctttagcttctaagttgaactattaaggccatgtactggatcgagtagatccacgataacaaaatcaacacaacacgtgatatgtatatttcacgtgacttagtgtaaaccccattacactttttttcccgagggaatgcacttttgtcccacaatcggggcggttcaccgaaattataacaccgacaacacacacaattgcgcatgtcctgcaaaaatttcgcaggataaaacaggatgcactattttcacactagcatatctgtcgttttgtcataattgtcattttcgtcggttcaacaagttgcatgtgcacttatttttacatcatgattcacatgatttgtacaatcgagtcgcacacaattacggtatgaaaggtattaggttactgaagagagtttcagaatgacagttgtgtgcgagagttctcatatttgattttttcacaaggtaaacgactggtagcagcacatcgttctttctatctcgaagatgatcggtatttttcactgaatatagtgagaatcggtcatgcgtatatatatatatatagagttcgttcagtataggtataactttcacattacctcaagtttttattcatttggtaccttggtatgagtaagtgctgatacttaactaagcaaacttgtttggagtctagcagctactgttgatattagactgactatcatccattatctcagctggattcataaattcatttattactcttaattattatttgtgatatactctgtctaaagaagaatcataggtaccaccaatagaagatgagaatctctcagaagttacagcgagcgcatgaggagcgcgaggatgctacgttctcgttcgagttctttgttccaaaaacatctcagggtgtccaaaacttatacgaacgtatggatcgtatgtatcagacccaacctgaatttattgatatcacatggaacgccggtggtcgtctaagcatgctttccacggaccttgtggccacatctcaaggtgttttaggacttgagacgtgtatgcacttaacatgtaccaacatgccagtgtcacagatcgatgatgctttaaagaaggcttacgatgcgggatgtgaaaatattcttgcgttgagaggtgatccacctatcaattctttaggagaagaagaagaatggaagccttgtgaaaacggattcagatacgccaaggatttagtttcttacatacgtgaacaatacggggaccattttgatattggtgtagctgcttatcctgaaggtcatcctgaatgtgactgcgatgacaaactgttgcttcatttgaaggagaaagtggactgtggtgccgatttcatggttactcagatgttttacgatgtcgataaattccttgactggtgtgctagagtacgtgaggccggtatctccatccctatcatcccagggattatgcctatcacatcatatccttctttcattcgtagaacgcagtggtgtcaaatcaatgttcctgacaatttcctcgaactattggaaccagtgaaggatgacgatcaattggttagagatgtaggaacagagttgatggtagaactttgtcaaaagttgcttgattcaggttatgtcaaccatttgcatatgtacactatgaacttagaaaaggcatcattaatgatcttggagaaattagatttgttaaagaggagtaacgttggtaaggatgtcatagaaccattggaacctctaccttggaggaaatcgttgaatccaaagagaaggaacgaattggtccgtccaatcttttggcaaaaaagaccatattcatacgtcgcaagaacctccttgtggaacgaggacgaattccctaacggtcgtttcggtgactcttcatctccagcctacggtgatttagatctttgtggtcattctttgattagacaatctgtaaagaaatccatcgaattatggagtactccacagaccttggatgacatgtcaaacttggtaacctcgtatttggaagggaaacttaagtgtttgccatggtcggatgttccattgaaccacgaagttgatgacattttgaaacatttgatcgatcttaacaaacaccacatttttaccattaactctcaaccaaaggtcaacggaaaaccatccacagatcctgtggtaggctggggtcctactaaaggttacgtttaccaaaaagaatatctagaatttttattaccaagagaaaagttaccattattccaagaaatttgccaagaacacagcgatcatctgacttacttcgccatcgattctcaagataatctagcgacaaaccatccagaagattcaagagccaatgccgtgacttggggtgttttccctggaagtgaaattttacaaccaactattgtggaaaaagcgtccttcctagcatggaaggaagagttcttcactatcttgaaagaatggaaattgaccttcgtggaacataaggcaacagaatcggtaaacttggtcaatcacatcatcgacaattacgttttgatcaacgttgttgataacgatttcatttcaacgaacgacacaatctacgatcttctacagcagttgtactagtaaattgccagcttatccccacctctttattttttttttcttcaacttttggttggtttaacaacacactctttgcatttcaacatggttaatattaattaattcaccacacttgttcgggtttatggtttatgattttttctgcatttcaacaacagcatataacatcgcaatattattctacattcagagttcaacatttctgaataaaaaatattcttgtttcaacaacaaatattacacacttgcttctttgtgactcctcggtaatgtcgcctgtaccttttctgtatatacaagtgaattattcaccttaagaatacacacatttatatattgctacatatatatatgtacacgtatattgtcattcagtaagagaaagaactatgtgctaacatatcatgtccaatttcgctgttgaattagcacccttggctacaacttgaaactattacttcgtaatttgtgtaagctgttccaatccgaaatcaccgtgtggctatagttacagttcccctaatctcgcatttcatttttttttccacagtatttttcggttctcatttatttatgtgaacccatgcaccagtaaagggcttttccaaaattaccgatttgaatgtcgagaaagtttaaatcttcatacaattcatatgaagtttagcattgaggaccagatcaagaaagagagaaaaggacttcttcactgtttctgaagtgcgtctgaaccccccttttaagaatttatagccaaaccagatataatagctttcaccgtgctagctgctgattgttgtacttttagagctgccagaacaaggtgttcgaatagacaatatccgaaaggtttaattagcctttaggggttctactgaagagaacgaagaagttgagaaaagtgtaaggcggggaagggaatatctgaactttcctaacagctaaaactgatagaaggcgttacattgtcacttgatatctaagtgaccagtgtaactttttgaaaagggagaaaattcgccaaaaacccacaataacaagaacttgggaagcattcaagcaagactagtcaactagaaggcatttagttatgtctggtttacctttatccctacaaatggagcctgttgttcacacgtcgtctacacctgtttctgtgcgtgaacgtgagcgtggtcagccgcagactaatgttaaaaatctgccgagaaaacacaaatcgaagtctataacagctttaacaagctcaagctctccagatattaaacagccaagtttgaaatggaatgtactaccgaaaattggtgagacgttgcatcaacggaaacattccatgaatgtgacatacacagattcaatgcatatagcgtatgatccaaggtacaattctagattgagcaagttcgatacatttattcagtttaatgaacaatgcgagttgtctgatgtgataacaatggccccaacaaggcttgagtcctttgtcaaatttttgaattattattacgaatcgaaaaaattcatgactaatactgaagaacgagctttcgaaacatcacattatcccggtacaattgatgggatcaattttctcgaagttgattatctcatacagctatggtacctacaatgtctccgattcttacataagactcaatcactttcattttcccccaacattgtgcagtcacttcttcagcgtcgtcaacgtgcaaaacatagatctgtgagtaatgggtttgttgacccagatatcctagttataaggtctaacatgagtgactcgttctggggctggcaagttgcatacgatgagccaagtctaaatatcgtagactacgagttcgaagtctcaatattttcgaaagctagtcaagatatacttgctctgcctatgtgtgccacattgagtgaattgaccgtcaaagatgttatgggaagatcaacggatgatttagaagacggtattagcccaatagattcactcgaacaacaagaacgtagcgattctgatgtttcatccattactgccgattccgcgggcaaaaattccataaactctagaaactcctctaccacttcgaataagttgatgaaagccgcccatgcaggtacatcgggcttggctcatttattcaaaaagaaaagtagtactgcactttcgacagcatctcccacattagacactataaccactactgataccataaacccaacaactgcaatatctgattctggtacactaactctaaagaataaatggttagaaaattattattcaaaaaaattatcaaactattcaagtgtacattctccttgctgttatgaaactcctacgtctactcctctcgaagaaggttttgacgagaagaaagtgctggagtataaattacaatacctgaagatcaaattaccttttcaagacaattcaataccttcgatgttgtgtccaaatttatggtttcatttaagatttgatgaatggaggtccgttctgcaagaaatttaccgatgcttagtaccaggcggttcgatacaaacggaaaattttgattttaagggatcaagcattgatactgacgatgaatgttctaatgcaacaacatcagagttcaggaaatttttggatgccgcagcgctggaagctatgaaagtgaacatccagattttcccaatgagacatttagtacatatgttaaatgaagtgggatttgttaatgttaaatgttgcattttaagtttgaagcgtggtgacttggttaataacttagggttcatgtatgagtttatggcaatgtgtcattacgattcaatcgtcaaaaagtacttgtccgatccgtcgttatacccagaagatacctatcctccaacatttccaatgcgttacttcaacgagcatatcaactccgtcgacaatcacgttggtgcacttagaatggtttgcataactgccgaaaagccactacgataaacttttaggttccgtacatacttttttaatatttacaggagtattttgcattaaattaatcgttaattaactgtcaaatcctttgcaaatgttcatgtttttttgaatcgtaatcgcattattacataaaatacttaattctccatcttataagactttccttttttttccaaagttccaactctaccaaaacgtttatcaaattctttacctagctgttcatcctccttataaacgtcgatcacgaattggtcttgttcaccgcgagaatagtatttggcctttactttagtacttagcgaatgttccttatgctgtaatgccttcacagtttcttcgttaaccagaacataagaaataccagagtctggacattcgtagttcacattcaataataatctttccattatgcctcttaaacctcttgcacctgttccctcttttaacgcaaactgtgcaacacgcttcagagccttttctgtgacacctagtgttacgccaaactgtttaaagatgtactcatactggtgtaagagagcattgcgtggttctttcaagatatggaacaaatctgtctgttttaatggttctaaagcagttacgataggcactcttccgattagctctggaattattccatagctgactaagtcacttggtgtgacgaagttcaatgcagatatggtcttaccgtcaccgatatcgatgtgttctatggtattagagaatcttagctttttggagtctgattctttatcattggctgttgcatctgggtttttaatgcgctcaatacgtttaactatatgtttatcaagaccaacgaaagcacccataagcatgaaaagaatgttggacgtatccacgacgaaagtttcctctttcttggcagctgtttgattattcttatcatccttctttttattcactggacgtttgagagtcaactcaacaccatgtccctccaatatcttcaacaatgattgctgaacaccttcccctgaaacatcttttgtaccaatactagctgcgggtttggcaagtttgtctacttcgtcgagaacaatgatacctttttcggccttggcaacatcgtagtctgcatttattaataacctctctatacaaacttccacatcttcaccaatataacccgcttgggtcaattgcgtacagtcagtgatagcaattggaacatcaagcatcctcgcaagggtagtcgctaataacgttttaccagaaccgctgggtccaaccaccatcaaattacttttagaaagttccaaatcttcgtcatcgttgtctagttctaaagacagctgacgctgtaagttacgcatgccttgttcagcttctgtagatgtgaattcaattggggatgtgctatctaacttcttctgttgctcttcgagtaactttctctgtaggcgagcttctagcttcttctgtttgtcattgactctcaaatagtgattatatacagcaacactgcagaccttcttcccatcattttgaccaacaatatattcgtcaagaaaattctttaattctttaggtgatggtatcttgttctttgaaccatggatcagtttagatgatgcactaaagcatatcctactatgactaaaattccttacccctagacttagcatcctaaattcaagtacttgaatctaaagaaatcgataattatagtgacagtccttaaaattaatatcactcgggtgcaacagaattaaaagactgctggagtaaagttttgtggctttcttattcttcttcaacaatcaccaaatagctctttagatcatttcaacattaaacatgaatttttcaaaggtttccattgaagacctgaaagagaaggtgcgcgatgagaacagtgaaaagtataaatagagagcaacagcacccaagtagtactttgttcttatcattggaaattttcgtgtatagaaatagtagtattctctatgatttgacgtatattgccattcaacactgtgtccgttcgcaatatttttgaagataaaccaatcgacactccaagaatcctggaacaaatatccagttgagagggcctgatttctatttgagaatatcacactaaccactattatgtctaacaaacagcatcgtgtgccagatttttactgttcctatttactaagatcaattccgaaaccaaactcattttacattgggtcctctcctgacccggtgcgacgtctgcggcaacataatggtgcagtacgtcgaggtggtgcctatagaactaagagaaacggaacaaggccatggaaaatggtatgttttatatatggattcactagtaagattgctgctctacagtttgagcatgcttggcaacatagttataagacgagatttatcgagaacaacgagagattagtgacaaaaaaaaataccagaaatggtattgctactaagttgggtaatgccaggcttttaatgaagcatccatactttgataagatgaatttacatatcagattttttgatagattagcctgggaaagttgggagttgaacaaattcaaagttgactacggattgtcactgtgcgaagtcgatgaggctgttctcacagatgagtcacagttggatgagttggacgagttgaatttagaaaggatcaaagccttttatgaggatcaaatggcccaagaatcttcacttttgcagagatatcaggataacttaacttacgaccaaaagagttgtatgatatgtgacaagaaaattgactatatacacgatgaaggtacacagatggtaggattctgttcggatgatgaatgtgattttctttcatgcctaagctgcctgtataaagagtttactaaaaactcaaaacaaataataccgaagtctggacactgtcctaactgtcataaatgtttggaatggtcccaaattgtaaaatactccactgttcttcgagaaaagctaataaaagactgagtatattattagatatttagttcgggtctatagaatgattttccagtcctgtcctatttgaataccagggttcttgataacgtgactgtgatcttcatgaataacttcgatatttgttctaatatcgtccagctctaaagtacacgtctccgcaacttttccatcgggatgatgagcgataacaattttctcaatagaaatgtcattgaagaaagatgaagtatccttatgtaatactgtcccatatataacgtttttgttatattccagctcgacctccaaaagtttcccttgtttgtaagcaaatgtctccccatcatcgacatatagccttcctttagcagtaccatatgctgttggtgctatcacgagcgtgtagggatcattttgcatcaatcgtgatgatctacgatattgatcttttctggtgataatatgaccgcctgctatgtacgctggaagtttctccaatggtgcagaaacagtcttagtttccaaagttccgaaatgtgcgatttctagattttgtaaatcatagaagactccactagggaatgtgatggggatagatttggtattagcagaagtgacaggcttcaccaatatgccctgttcacccaaatagaattggtcatcaatgtcgtagaaatttgccacatttggatgttcatagatcattggattcataatgggaattcctcttgaatgtgaatcgtgaaaggctgtgtatagcgtcggtagtagttgatacctgagtctgataaattcagttacaactgaccttgttcgctcgttcaataaaaatggttctcgtcttctggtgtctatatgtgcgtgggctctgaaaaatggataccatataccagcctgataccaacggatcaatagctcgtcatctgggtttccgaaaaagccagctatatcagctccagttgcaggcattccgacaatgttatgactcaataccatcggtatggacaattgcaagtattcccagttagctacattgtcaccggtccatgtagctgcggttctttgcgatccagaaaagaacgatctagtcaagacgaacggtcttttgttcgggttcatatcaacaaaggaatcataggtggcctggtgaacagttagtccatacaagttatgcactgacctttcttcgaatccattataatgaagaagatcctttggggctgtagtttccggcccatcgaatatcgaaggctcgttcatatcattccatatatagaggttcgatggcgtagaaataaaagtttgtacaaattttgaccaaagtttgcttgctaatggattgaaagtatcaatccaaatggattccccaggccaacattggccaaaaaacggtttgttcaaagcgtttcgcacatatactttagcggctattatggcttcgctaatatgatagtttgattttatatgcggatcaatgagtgtaaccaaattccttcctaagaaagctaattttgagagcattctagttggattcggaaaagcatctggcttccaggtaaaatattgcttctggtctgtgtactctaaatctaaccataaaaagtcgtagggtatctgccatttatccatcagagaatccacggtgagcacatccttttcatcattgtaattccatctacactggtggtatccaactgaagaaagtaaaggaagcattggttttcctgtaatattaacatatgactctgtaacaagttttggtgtttcctgaacaattacaatgaaatcaatgatacctgattctgacatccaatgagtggaagagtcgctgtgtccgtattggatatcaatccaggtatcagatgggttcatccaaaacagtccgatcgacagtgactcttttatcccaacaacgaaggggatagaaccatacataggcaatgtggaattcaacttatactgaaaaacatcaacattgtaaagacgataagggtcaatgtttgatgtgtcacgtagtctcaaagaatctgcatgttctgcgataccataaagattagatataccatgaaacttaaagtctaaggctactgattcaggaccaagcgggattgaatcagattttgagtccgcaaagctatctttaaacatgttgaagggctcttcttcttcgttgatgttctcgaaattttcttctaacgttctataatgttcaaaatttagcatattatcgctgtttaccgttagaacatctgccgagtcatatttgacgtttatttggaagtcttgagaactcaacgttactgtgaacctatcggccgtgaaagtgaagtcctttttattccaaaaggtgggtgactttgcaataacctcttgtctgataggtatgtagtccggatcaaatgcccaatgttcagtctcattgtacctttgtaaattgataccagctttacctagtttaatgcttctatgctcatctaacctaaatcttactttatcgccgtcaaataaatccaaggtaaaaggaagaggtatcttgatatctttttggttagcttttatgctcttgataataaaaccctgtatagtatgattatttgtatcaaattccaagctgccttgatcgagactataatgactgttcctgctttcttggatgtttttagcgtattgtctgtttctatgacagaatcctgattgagagcatttttttagcaagtcatcttgaaatgctaatgctatcccaaaacttagtaaccaacgtagtaatgtagatagtgatagcttcattctcgaaagctttggcggccaatgaattcaggcaagctatgatatgtgctctttaaatgaacagatgcttttaacggttaacgtttcttaatataaactttttcctttgatatccaatgtttacactttgcatgctgacagaaaaaaatacgtaatgacatttactaaatggaaaagaaaccgttaactaaacgcagaaatggtagtggttagtcttaaactgcttcactatttgaccaatgcttaacgcatactcctcttacataatgaattactgttttcatttaagcctctgagtctcatatttaggtgttcgactcacgcggtaaacatgccttaatcaactgaatgaaactctttactgtacttcgtccatggtaaagagaaagcctcgagaaacacacatgagagaaatgcacttagatgctactatgaaactttattttatctataaatatagcctgtaagaaaagttcttaatggataccagttaatggccgagttatcaccgtctattcgattcgaacaagaccaacaagtcattggtttagaatttttgagagttttaacttggtaatcatggaagtagtagccacgcttgcaccaattagctgcgataatgcagagcaggcaaatttaccaccaatcaaagacgttttgggcgatattccaattgttagttcgcagatagataaactcagaaaagaattaaccaggaacaaaacggaactacaagcttcaattgctaaaatgaaagccttgattgaaaattttgactacgagtccatcgtagcgatacaaaaagaatgccaagtcattagagagttcactaataagattagaatgagaatgattaaacatgattgcattgacatccaaaataatagtgacatttacataaatgaaattattccaccgacatggtttgaattcaaaagggaaggtccaaagtattgcgttcattgcgagtgtgtggagactattgaatggcgtaacggtccgtggggtaaagcgactttgtgtaatgcatgtggtttgtggtatcgcaaattgaagaaaaaatttaccgcagaacaatcagcaataataatggaggagaaaagactcttttccaataaacatgataggaaagagttttctaaatttgatgcagatgataaaagactaaagatcattaaggactcattgattgaccggataaacaaattcataaaggaggtagagttatgcaagagtactgctgccaagctaaagcaaataaaagcaaaagaggatatggatcagaaagtgacacctcgggaaataaacaagtacgattcaatttctcgtatatgttgaatgagcagtttagctgacttcaaaatagattgattggaaaggtttatatcattcaacaagatatagagctcaaatttttcagttgcccagtatacaccagataacaaaccaggagtcgcatcatttttccacttaagcattgcaacagatgacttatttaagtttgtacccttatcatcttcacaaaggtttttcaaatgataataaaattgtaacatttcattagtcggttgggatggtgtgtatatctgtacagttcgtttcatcttataaatgaaatgattgatgtacgggaactttttatgccaatccaatagctgtaattccaaattattacaagtgttatcgtctatcattttgtcctcgattcgccgtacaaattcattcaatatgtcaaaagcatttttttgagaacttatcaccatcatgatagtattgttcggtaacactttgatcaaagcatataggaatccattatcgttgaatttttggaaacatattggaaaccacaaaactttgtctaataaaagatcagtaagctgagcacgcactacctcaaataatatttgcaagtccatagtatgtaaagtgtggtttgatggtcgaagaattgatatcaatctcatatctaacgacgtaaccaaagtgtaaagaatctgtccgttatggttcgatatattaaagtccaagtaggtcgtcgacaagatagaatttattgcatttctctttttaggagacatcggcagacattctagactattagcaaaccaagttagtttcggctgcgtcgcgagggattcacaaagtgatttcaataattgctgatccaaatccgttagataatgttgtaagtcaaagttggatcttttcaacatcaacttgttcaaattcctttgagataccgacgatatgatatatgaataaacaagatccaattgttgctgcaactgagctgtggattcataattattattgcactggaccattaacttgatatgatttttatctaagaaaacaaatcttgtcattatcccgtccttaccatacatagtaaactgtctcattgctgtattgtcattaatattaaaataattcatcacggtatggataataccagtaagacccatagcatgattctcattttcccactgcgagaagactaatttaccagctgaagtaaacacgaaaaaatgtttatccttgccaccccgttcgtcgataaatttggtagtattcgcagacttattggaagtttcttggtttaacgtcaaagggtatagagaatttaactcagaagttatcaaagattgtaagtcaatattcaaatcagtgtccgcactgatagaatgatcataggtcgcggccagcaagttgggatcatttttggccttaattgatgctgtggttcctgtatcgatgtcttgataaaacagcccaccgcgagcactgagatggtttgtcaggtcaatagaagtagttggtttcgccgaatttttcgtactaatttgaaacgacggagatctgcgcattatggtaatcaacgtagtcgaatgcgatcgggagatcgtccacaatcagttacttaactcctctggtctccagattaaccttttattattcaaaggtttttttacatgagctttttgtatgactatttttttttttttttttcaaggtctgatgattaagataatgaagagaaaggaacctgcaaggcaatgacatccaagtcctggcgtgaaccagtttccgttatcaaagaagtgagttttacatttcaaattaagaaggaatatacataggatagaataaggaaaaagatagtgttatatatatatatgtagaagaataatatatatgtggagagaggtcctaattttatattcttttttttacttcataagaacgacacaattttagaaagcatcgtctgagacaaaatcgtgactttttctcttcaacttaaagagaatgaaatagagagatgagatgacgagttaagaagagatttggagaaacaagttttccacaaaaataaaaaaaaagaatccatatcagtgtctcttatcgaatcttttgtaattgtagtaactgacgtaggcgtctgcagcaatgaaggcactcaaccctgaaacaatcaaagcgatatccttgtcagacttccccttcaagaaacgtcttttgttagcatatccgtttagcaaagttgtaatagaggctgcacctagcaaagtgttgaaagcaactacagggttttgcaattcatgcaagacaatagtggtagccttcgaagtattagctgcaacggtagaaacagtagcttgagtaacaccaactgtcttgctggcgacagcgttgacaatttcgactagcttatcccagtatggtttcaagattccttcgtattcatcgagatgttttttaacttcgtcatgagccttatcaacggcatcatgggcatcatgagcagcatgtgaagccttattcttagcggtctccttggcttccttgacgtccttagctgccttacgtttttcttgctgctggttgtggtgttgagcgtcgtgtttttctgatgacatttttattttctgttgatacactgatacgtttgttgtgaaactgaatccctaaagagttgataatagagagaatatagaaaatgttaaagccttaacaaaattgtaacgatagtttaccttattttaatgagcactattttttttcggctttttctgtctctttatattttcggggttgaatttatagaaagaaaaaagggtaaactgattatggtatttctgtctaaaggaactattaaaaaaaaacaccggtatgggctttgattctgaactgatttgaaccaaactttgaacttttcgatttggacctgaggttactaaactaagacaatcttgtggagaagactcaaacaataccctactagtagtatcgcagttatataatatcgtacttttcagggatatatcgctacttaaatatccgtgctcagaactgatctagaaaacaaaaaaaaaaaaagaaaacgggagatcacaatcacaatcacaatcccaatcacgataaaagctaaaagtcgaacaatgatgaaatgtcacagtgtgacgaagtgtaactattggtgatgtagtgtgagtgcttttatgtattatgtattgtaatacggatggagcggttacagccggttcccgctgcgttagtttggcttctctgttccacgtttgaacattttctttccaagatgctgagaaggtgtgcggcataaacgtcatttacgctggatagcgatagaagtaatcacttttctgtctcagaagatgaatttgcttctgtctaataggccaattggagtgtatttgctactaacatggcttgataatgttgttaccgtaaaataagggctgttcttctgtatacttttctgtgtcctattgactgaatgtcctgattgcggtgaaagcaaactgagaaagcaaaatgcatgccggacctggggtaacctagggtaaccaaattatatctcctagtcgggatataaattttgtggactgcttttctccattaacacccgtacattcggcaatttcaatttccatcttttttttcaataatgatcgccactttctttaataggaaatattgacctttaaacaaaactatcttgacacgtgatttatagcctctttatatcctcttaccctgccagtacaatcaaagtttttcaaaggtttctagcttcacaaccatgcaaacacgtcggatatttttttttcacacatgagacctatctatctcatcactaaacaaagctgcatcttaccaaacgttaagtaatttaattttataatctctatttgtttctccttcgaagctccccacgcattgtatttattgtcgattgaaagttacctatccatcaactttccgtgatccaatcccgacaagtctttattaagtacaattcgataaatcaaagatgtctgctccacaagctcaaggtcaacaagctccacgtagaggtggtttcggtggtgccaacagaggtggcagaggtggtagaagaggtggtagaagagaccaagaagaaaagggttgggttccagttaccaagttgggtagattggtgaaggccggcaagatctcttccatcgaagaaatcttcttgcactctttgccagtcaaggaattccaaatcattgaccaattgttgccaaacttgaaggatgaagttatgaacatcaagcctgtccaaaagcaaaccagagctggtcaaagaaccagattcaaggctgtcgtcgtcgttggtgactccaacggtcacgtcggtttgggtattaagaccgctaaggaagttgctggtgccatcagagccggtatcatcatcgccaagttgtccgttatcccaatcagaagaggttactggggtaccaacttgggtcaacctcactccttggctaccaagacctctggtaagtgtggttccgtttccgttagattgattccagctccaagaggttccggtatcgtcgcctccccagctgtcaagaagttgatgcaattggctggtgttgaagatgtctacacctcttctactggttccaccagaactttggaaaacactttgaaggccgctttcgttgccatcggtaacacctacggtttcttgactccaaacttgtgggaagtccaagctttgactccttccccaatggatgtctacgccgactacgccactgcttccaagaagaagttgtaaatgtcatctttaaaatattataactgtgctgtatagatatttttttatagctgtcagtatgttttctctgaaacaataatatattgttgacattttaccaattgttcctcttctcttcacaagctacatatcatatatattcacactcattataattgaccttaaccctttaggatcgatcataataaatgatcaatatacgtgacaaactaactaagggaaactatatgactgtcctatacacttcgtagcaagaaaaaccagagaaaaagacatatggtaaaaaaaagagatagtgataaaatcaaggtaaaagggatttctcttatatgaccattagagtacaggtcaagatacgccaatcatattaataggcttctggaatttaaacactgccagtctcttttttacagtagtctttcttccggttgaccttttttttttattactttacagtatttttttaccttttaagactttttttttttttaataattaatagatataacactataataataattcaaataaaacagttaaggatatcaccattaaatagagcggagtagattggaatgttaactcatcatcatagcatcgccatctacttcttgtccagcatgaactgactgtacgttagattctggtacagcaaatggtctctcgttactcgaggaatttccacttccaatcagctgcggattgaaccaaataccgttggtgttttctgtatcaggcttttttggcttttcaggcaataccctttctggaggatgctggaataaacatccgtatgttctacattcagccccgtacctacaaggttcattgatagggtgaccgaagaggcagtctattcttgtacattgcgcaccctcgcggcacatgattgacgaccttgcgtgtctctttggacaatttttattggtacattttggaccaaacttacattgttccaaaatcttttcttccaatgggacaaccgatcttggcgcgaattttggattagaaggtttagaaatgaccggttttggtgctggcttgtgtatgattggttttatttccttaatcttggataaggaactgtgagccttgttacaggtcggatcagtgcattgcaagttgttctcgcaccaactgaattgggtaacctttgcgtcttcatttgcaggagttggatgaccaaatggacatttttgattagaacaaatgatcccaaatttacatacaacaataccactgatcctttgctgttgtttcttttccatctcttccctctttatcctgcgttcttctcttacacgctctagttcttgtattaattgtccatcttcatttggatgtaaataagtgcatgtacctggtggatttttacagtttggataacttggacacgtaacggttggatgtccacgagggcacttccttcctagagaacagtgagggaaatcaggacaacggccttctctcttgatgacaacatggccagatgtttcatttgcgccttccgattcatttattccaagagccatcgccagttggttagcaccgtatctcgagttaactccacgtctattggtaacaccagcactctttgaaattccacctctaatggagctgaaaccaccacgtctagaagtcccattatgggccgatgaatctttgttacgttgcgaagacctcccttcgttagccgtattatatttagatgcagacacatctactaccccgctaaatgcagaaaccggtgcacttggagctggagcagaaacgggtggtgactgtactggtactcctacagatgtttcggttccagttgacacaggtgcagaaggtgcacttgaagaaggttgagatgaattaccactcaactttgcataaacggtgttcaagtcatcgcctgctttcaacagatctgcagatgtaaatgcaatggagacaacactctggaactcttgcgtactaataccatcaaacaaacttgtcaattcttgtacgatatcaggaccgctggaaccgttggacattaaaagtgtaatatactcagcgacttggttaacatcttcgttgaaattaggaacaacctttaatctctcggagatgacagtctttaaattgctggcaatatattcaggtacagttgacatgttgctactcttggtttgtgtcctctttagtttgatcaagcaacaaaactagcttttatccttgttcaaataactgctaaagaatcattcagattattcgtaattaatttcgttttaagtatatgtaatcttgttcttccttttcttgtaccagcccgaaacaattttttttttggctctgtatacggaatatcgtagaatattacgcagaaggttgagtggagaaaaagaaatcagaacgatgtcctctgctatccgagctatcacgtgattcgttgttaactcctgtattatatgttagttgctatatgatagtgacagtgaatagaccctgttccagttttaggtagagacctggatcagtggttgatgagcattagaaatctttctcatatttataaaactgctagtagctttctctagggaagtattcattatttagaggagttaattattgggtttccatgtggaaatgcagaatgattctatgctataatttatttattcgtgatgagatgcaatgcatataacaaattccgtcgaaatttcttacttcatatctattctttagaaaggtattctttagaagtgtctcgtagttttgtcttcttgtctttcatgtaatttattacattgttaaatgttatggtcgtaatgcttttaataagttcctcgtattcctcgttgatcttggtaactgcttccgacttttcctgcaattctatctggaattgttcataagtgaaaggttgcaacgatcgttggtataaattcggatggcgttcacaaaggtcggcaaatagatgaagagactgcaaaagaagacttgctaatgtgaggtgtagagagtaatccccaagacttctcttattagataccgacaggttgtacatttccggataaatagttatcacttcgttaataatatcgatagcatacgctgaaaggatattgagtcttatggctaatccatccaaagtttcatccctaagtgcttcctttatcttctctactccctcagttaaatcacctgcaagaatttggtatgcagagagtacaataggaagtatttgcacttctaactctttagcccatctgtttatatttcttcttgtagccaaaagatcatcggatgccttggaaaacaattcgtcatcatgctcaagacgtcttctttctgagtctattcgcatgaaggcgaatataaattcgctgctgatttgctccgcaaaagtaatttctcgcgacataaaatgtgcaaatcctaaataaaactttccaagatctattacatcgttcttcccatcatacatcaccaaaaaaggatacttcttcctcaataattctgttagtttctcgctatccagatggttagcagaacttaagttgttcccactcattattttggtacaaataaaccagtgaaccaccccgatgtgattataggctttgatgttgatatacacccaataatgaaaagtaaacgtgcactttccactgttaacttctattatagtcatcctcggttcaaaatacattggaagcatcttagtatggaattgatctccagtcacgtgaagagaatcaaatccgtttacagtgatatattctccctttaacctgaatttttcaaaatttagtaaaaaaaaaacgcgacgccaataatgcatatattatagttttaaattgaagagtaacattaataatttttgcaaactatacccattgtttaagagctggcaggaaattaaagcaaagggactctttggtacttttattgaaataacctgcaaagcatttcgtggctcggtatttcaaactcattgttctattaggcgtggcagttgtcttttttggttagatattgaggaccccattgtgctaatctcaagtaacaatgagtgacggaggaattgaaattgatttccaagccttttatgataggtttacaaaattagggaaggcatattctggatttgaaggttctccaaatagtcttctctttgtacttggttcgactaatgaggaaaacccttatcaaaagaccaccattttgcataattggttgctagggtatgagtttccagctacattgattgcctttttcaaggataaaggtgtcatcataaccagcagtgctaaggcgaaacatcttttgcccgctgttactaagtttgaaggatcagattacaaacttgagatctggcaaagaaataacaaggatgcaaatcacaataagaaattgtttgaggacctcatcaagctgttatcagaaaacggtaatactgtcggtgtcccaacgaaggattcatatcaaggtaagctcattcttgaatggaaaccgctttgggaagaagctaaaaagacgcattctttaaacgtaatcgattgctctgctggtttgtcttctacttggaagggcaaagatgataaggaaaaggcttacctttctgtatccagtaagggatctgacaaattcatggatcttatgtcaaatgaaatcgtcaatgctgttgacgaagaactaaaaatatcaaattctaagttgtcagataaaattgaaaacaagatagatgattccaagtttttgaagaaactttcaagtgatctaaatcctttgtgtcctaccgacgagaaattcgacgttaatttccttgattgggcctattctccaattgtgcaatcaggttctaagttcgaccttaaggtttctgctcgttctaacaacgactcacttttcggaaagggttccatcctagcctcatgcggtatcagatacaagaattactgttccaatatcaccagaacttttttgattgacccgacagatgaaatgactgacaattatgactttttattgattttgcaagagaagatcatcgatgatttattaaaagtagaagctgatccaacatctatttatgaaaagacactggaattcatcaaagaaaagaaaccggaattattatctcactttactaaaaatgttggttctttgatggggttggaatttagagactctgctggtatgatcaatgctaaaccaaccgctcataaaatttcagagaattgctgttacaatatttcactcggatttgggaatttaaaggatagtaaaactggtcaggtatatgctgttcaattagcagataccgttcaactttcttctgatggaaagccatccactttgaccaagtacacaaaggctagatcccaaatctcgttttacttcaacaacgaagaagagaacaaagctgcaactgttaaatctgaaaaaagcaagcctcctgctttaccaaaacctgatggtacatcgaagattttgagatctaagctacgtggagaaagtcgtgctgacgatgaagagaaagaacaaatccgcaaagagaaccaaagaaaacttcatgaaagattacagaaggaaggtttactcagatacagtgatgcagatgcagtagatggcgatgagaagccaaagcatttcttcaaaaagtacgaatcttacgttagggaaactcaaataccatccaatgtacgtgatttgaagattcatgtcgactggaagagtcagacaatcattctaccaatctatggtagacctgtaccttttcatatcaattcatacaaaaacggttctaaaaatgaagaaggtgaatacacttatctcagattgaatttccattctcctggtgctggaggtgtcggtaagaaaactgaggagttgccgtatgaagagaacccagagaatcaatttgttcgttctctaactttaagatctaaggatggtgctcgcatgagcgatgttttcaaacaaattactgatcttaagaaggaatctaccaaacgtgaacaggaaagaaaagctttggctgatgttgttgtccaggctaaattggtggagaacaaaactggtaggactaaacgtttggaccaaatctttgtcaggcctagtcccgataccaagcgtgtgccaggtacggtgttcattcatgaaaatggtatcagataccagtctccattgaggacagattcaagaattgatatcctattctcaaacatcaagaatctattcttccaatcatcaaagggagaacttattgtgatcattcatgttcatctaaagaatcctattttaatgggtaaaaagaagatccaagatattcaattttacagagaagcatctgatatggctgtcgatgagacaggaaacagcagacgcaacaacatgaaatttagaagatatggtgatgaagatgaattagaacaagaacaagaagaaagaagaaaacgtgctgcccttgataaagaatttagatattttgctgaagctatagcagaggcatccgatggtctcctagatgtagattctccatttagagatcttggtttccaaggtgttccttctagatcagccgtgttctgtatgccaacgagagactgcttaattcaattagttgaaccgccatttttagtcataaatttgaacgaagttgagatttgtatacttgaaagagttcaatttggattgaagaactttgacatggtctttgtttataaagatttgacaaagcctgtttctcatataaacactgtaccaattgagcaacttgaattcattaagacatggttaacagatgttgatattccatatactgtttctacaattaacttgaactggtcgacaatcatgaagtcgctacaagatgatcctcatcaattctttttggatggtgggtggtcgttcttggcaactggatccgatgatgaaagatctgatgagagcgaggaagaaatttcagaatacgaggcatctgatgaggatccatctgatgaggaagtgtactctgaagaagaagaggattattcggatgacgaaaaattcagtgatgaagggtcagatgatttcgccgatggatcagaagatgacgaaggtgatgactgggatgacttagaaaagaaagcagctaaggcagatcgtaatagcaattacaaagagtaagatttttctgtctctggatagtttatcgttattttgggttgtatttttataagcacataatgtaggcactttaaaatcttttttattgaaatagttggttattctggttggtttatttatctcaacgtaattgcattcttattacatattatacatacggttcatcaaattaacatgacagcatcgaaagtgcgatggaaaataacttactaaaccccctcaagttcagtagttagaaaacccagttgcctgtgagccaatcgcgccatttgtcaaaagtaatggctggtcatcggagttagagcctacttttgcctttgatgcaaactcggaacttaattgcttgatcgcatcattttgctccttcttcacagaaatttcatatggtttaataaatgtttccaagttattcaaccaagcttgttcaaggacagtatcgtatgtaatcaagtggtaacaagaatatagtaaagcgataaatccttctttgttgtcggtttcaatgaagaatgataataggtcttcggcgatctgttgactttgtgaaattgcagcagtttcaatagcatgtttccagagctgttcgcccttgaagatagccaaactcttggcccactttttgtttctacggtacaattcggcagcaataatcttgaagaaaattatctcatgattttccaaacgggtggccaactctagttgatcaaacttatcatacgagctaacagcgtcttgaagagctttgtaatcaacctcttcgatcatcaaatcgtgataagcctgattaactacggagttgttttttggcaagacattaattaagaatggtttaatcaatggtagattgtcagatttggagaaaattctaacagttcttggaatgtctaatcttggaatcaacacggttaataaatcaacaagtagtgaagggtgttccttcacataaaagttgattgctttgtagtaaatttccaagtttgacactttaacaatgatttctttgaagtacgaatggtcaaagttataggcagacttttcaatcatcgttaaagcagcattatcccattcatcgtagtgtgcatacaaaaagatcaattctggccataaatgagcatcctctacagcccttatgacttttggaatgttaatacgagaccagaatagctttaggtgttcataagtcttggatggattgtacttagtgtaaaggattgccaattcagtaaacatacccatatgagctctttccaaacctaaacctgcttcgaatagggaaattagctcctcgaaatacccgttgtgctcatatacagcaaccaattcgtctaactcctcggcatgaacaaccaaattcaaaccacagatttgagccaatctaaattctttattggaaatacatgcgtcgttaacctgtctccacaccttaacattggaagcttttctggcggtatcgacagcattttgataatcacccaaataaactaaagtgctagccaacttagagtagttagaaatagaagagtaacataatttggcagctttgtaatcattatgctgggataacttatcaccaacttcttctaggttagcaacggtagagactgacaacaagttttcaatttcattcaacttactcaattcagcgtatgccaagattaatgctccgtcgattaccggttccttcaaagattctctagccatcaacaaatatgggacaagctcttcaaatttaccagcgtcttcggcagccttgataacgttcatgaagttcgaaggatctttagccttgatgtaagagtcaatagcttctgggatacgtaatgcatttaattctgcagtaccaagttgagaccatagctctggtgtgttgattttgtcggcatatgattctgctctgtctaacatcaaaagatcttcgactataactttcaatgctttgtcatgtttcccatgtttatcataaatttcgaaggcttcttcatttaattcattttcaatacacaatggtgcaatttcatcaacatcataatgatctaatttctcaattaagccacttaccttgttaggttcatatctaatagcagagagaagcaataaaccttgcaaagcaggattgtcattgaaaggagatggctctaggataatcttctctaacaattcaattaactccgtctttaatccgttagacataaaagcctgcacagtcaaagacactggttctggatcagtaagctcaggaatgccaacgctaatgacagcatcaaccaattgacgtctatggatattgtcaggagacaacacaatgttccacaaatcagagtttgaacgagccaacaaatatctggcctgatatttgtacatactattttcgtttgtgattctaatcaaatcatcatcgttttgtcctttctcgtaggcgatgtacgccaagtaagggtccctcttttcacaatagcgaccaacattcaaagtatcatattgatcattctccttcaagaacttttcaggtgagttgtttgagtcaatgtagatcttagctaaggtgttgtagacagactgattttgagtcccagattgtaaagtcttttcgaggaatggtaatagtaacttcaatctgtttctcttctcgacttcagcagtcaattcatcgataggaacttgaccgacgacagtatctaacaatgaggtgataactttctcgtcacaatcaacatccaataaacctgccacaacttgagcagttttagaaggattaacttgttgcacgtacacttcgataaatttgaagtttttggttctgtacaagtataaaaccaagtcatgcaccatgttgaaacgatcgcaaacaacaaccaaaggcatttgatcttgtagttgggcatctttcaagaaattcttgaccttctctgggtcataaacgttgttttcccttacaattctttcaacttcttggaagtgaccagctttgacagcagcttgaatatacttgaaaacaacttccttatcggtagtcaagtttactaaagaagccaagtagtaatataaaccttcgtttgatctataatcttcgaagagtttgattaatacttgagaaccaatcaaatccgagaacttggttgcaacttgaatgacaatttgaagatttgcttccaaattatcatctaacaaggtcttcaaacaggcgagtgattgttcgacattcaacttaccgaagaagtccactaaccaatcagctggaatggaggaagtatggacaatacatctcttgatatccttaatatcagagtagttttccaaggccctttggtataaacctgccttttctgccaaacctgcaatagttggcttatcataataagagaaaatgtcattacccaaaatagcatcagcaacttgaggggcatttaataagttgatttccaatactctcgtttgcaaatgtccttgatcaggagtatttgatcttaaagcgtcaagtaagaaagaagtaccttgttgaatgtaattctgactgaagaatatgtcggcaatcttttcaacttcaagttgagaagcagtttcagggttagataataaactgatggcaaactcacttgctttgtcggggttagttcttaataggttagaaatcaaaacaacgaagtttggattgtatcccaccttggcggagtatggtaaaatcttatcgaactgttgcaattctgcaagacatgcaattacctttggatgtacttccgccttcaaataggttgccaaagccaaagtagtatcaaatggcttcacgatgtcacctaattcttcagagcattgtaatttgtcttcctttaagtacttttcgtataattgatttctattttgttgtagaagtggtcttgtcaattcaatagactcatattgatttagtttgcccttatccaacaatgtggagaaatatagtaaaattggagagattgatcctggaggtgcctggatatttttcaacttgttaattgtagcttgagttcttaattgctgggatgacgcagcaactttagcagcattgctgtaatcgccttgtgataaaaggttgtcgaattgcttctcgaataaatcatcagcacctggtagtccacctctcgaagccattgtcaatgcgagggatacattggacaacttattcaaaacgtaaggaactatttgagtagtatcaatttcaacagccaaaacgttaccctttttgttgatacatgcgataccattcttgtggttgtagtatgttgcagtaaagacagagtccgcagtgattctattgacgaacaagtttgaaccagtctctaactcatataaatggataaaaccgtacttggtcaaaacataaatgatgccgtacttctcagagacttgaacagaaattgggaaatcgttaactgcatcagctggaaagaatatatctacaatttttttctggtatcttactgactggtcttgaggtggatcgatttcaattatacgcaattcgccagcgcctgtgttgacgtttctgttacctgtaacgaagacttgaacgggttccgtgttaccatccaaaagaattttggagaagatagctacgtgaccatcaatggcttgcgagatgcctctagttttcgaaaacaattgaattttaccagcaattttaccattttcttgaatgataccaacgacagcgaaccagtccattttttcattggcgacaaagttgataatttgggtgttgtttaagttaacgtgtctatcagtaattttggctggcttagcagaaacgtttccatcaaacacattggagacgtaaagtgagttagcagtgatgaatcctaacacgtcttcgctcaaccatttccagaaaataactggttcatccaattggaaagatttcaatttggacttagtatccaagttgaagatttgaacgatggttccgttagctctaacagagataactttttgtgaaggatgcatgatggcagagtcaccacccatatttttccttgtgacctcattgccgtttgtcaaatcgacaattgccaccgtgtttgtaccgttggaggactctctaacggtgacgaaatgatcggattcgaaagtggtagatctgaaatctaggtattgaggggagatacctagtgatgttagatctaccaattcagtaaattcgatgggaagatcactcattttggttttcagttttagtttttaggtttaaagtactatttcttccgacttatcttaggataattccacttcaattgaattcgtgtttataacaatctacactgaattgaagcgacttcttcagcggggagtcaattaaagcactgatatacttcaaagggaacagaaatgaagatagtgcaaagattgacacctaatttagctttgctttgtcttttattttagaaacaagtttccgatcggatcgagacaaaaataagaaaaaaaggtatagcaattagctctgtaatacttcgatgtagtttccagctttgacttcaataaaccaattgcagtcaatgagtcgcagtcctgcggaaagatggattaaaagaataagtttagacaatctactttaaaccctttttcctaagttaaaaagtcgtttttaattcgagaactatgaattttcaaagaaagtgcttaattcacttattttcatggaatgaaggtaatttcaattcaaaagatcaccaaacaaacaagatacagaatctggtaaaaagggggagcctattaaacaaaaggaaaacaaacggtacatcgaatatatatgtcatgggtcacaagatagaggaaacattttgaattgagcttgtggcctatcactaatccacaactcagccttactcgttgcttacttgcttctgaatatcaaatggaactagagaatgtcctcggccgggtaataagtattatggttatatacaagcatatatatatatgtttactgcaccacatttttcacgtaacgtgaccagcatattcaaaaaaaaaaaggagacaacgaagttttatatccgggtaacaatattagacccccttttctccaaatccattctgtttgtcacgttacccggaaatgcatcgtgtcattactgacgatccgttttatcacatttctcctcaccagcagttctccctatgtgctagctccgatttcgatttcagtcatcccgaaacttggaaacccctactgcacataatgtgcactcgcaatgaggaaagaatatagaagcagagaaatggttacagaatattaacgccggaagggtatcggatggcgtgggtaaattaagcccgcccagcgaaggcacgcttgaagcatgcgcttacatatccaaactccaattactttattctctgttcattaagctgcgattatctctatcctaaaacactagtaacagctggtgtgatcttctatttaattaccttgaaggcattcagtttcgcattatattgctcgctcggtatattgactagtgctagtttagtgcccttggagttagcgcggattgattagcgtattatctgaatccctgaactttttttttgtggggaaactctcggccatatcatattgtccccttctctggagttaatccttctccttttctttaacgcccacataatgcgtacctttggcttcatttgttctgaaccacgtgagaatttaggcgcctctctttaatttgtatatattctttgtcatgcgtcagcgttttcttaccccaaattatgttatataaaagaactacatcgaaacagttctacaagaaaagattaacattccagtaaaagataatagattgatacacttaaatattttattgatactgagaaccttgcgtgtgtgattacgataattccgaaatcacatatctttaagaaggattacaaaataagataatcaagacaaaaaatgactagacaatctacggtagatcaaaatcagtctacgtataatgccaagaacttcattactaaggaaagacaagaatcaaaattagatattgaccagttgaatgtatttttggaaaatggagagcaagaagcgaaattgacccatgatttgatcgaagaaattatcaatgaccctattttaaagacggatacggatcattacgatattacgaagtctcaggaaagagagattactgcaagaagaattgccaggttatcgctttatatggaacacgatgtgaaaaccaaacaaagagagttcaaagatgatttggtaaaaaacttagaaaggaaggactcgaaattgttaacgaacaaggatctatctatctttgatagaagattatcacttgttgcgaacatcgatccaggtttatccacaagaattggagttcatctaggacttttcgggaattgtatcaagggtaatggtaccgacgagcagatccattattggctacaagaaaagggagctcttttattgaagggtatctatggttgttttgctatgacggaattgggacatggttcaaatgtggctcaattacaaactacggctacctatgaccctagttctgacactttcaaaattaatactccagacttgctggcaactaaatggtggattggtggtgctgctcattcagcaacccataccactgcttatgcaaggttgatagtcaatggtaaggattatggtgtcaagacgtttgttgttcctctaagagatgagaaaaccctcaacttattgccaggtataatgattggtgatataggtgcaaaaatgggtagagacggaattgataacggttggattcaattcaagaatgttgtcattccaagacagttcatgctacagagatttaccaaggttattcctggttctccaccgaaggttcaaacgcaaccgttattggatcagatttcagggtacagtgcattgttgagtggccgtgttaacatggttatggattccttcagatttggctccaaatttgcaattattgcaacacgttatgccgtaggtagacagcagtttggtcctgaaggtaatgaaactcaattgattgactatcctttgcaccaataccgtgtgttgccgcagttggcactttgttatttggtggcacccactgcacataaattgatgggaacctatatttcaaccctaatggaattgcatcaggcaggagcagataaagcaaaattgattaatgttagtaataagttgaaggatttattcattgattctgcctcattaaaagctactaatacgtggttggtggccaaattgattgatgatctcaggcaaacatgcggtggccatggatactcttcctacaatggatttggtaaaggctacaatgactgggttgttcaatgtacctgggaaggtgacaacaatatcctctcattaacatcagctaagagtattgttaagaagtttgctgatatctcacggggtaaaaatactactgtcactaccgactcattaaaatacttgactcctcagtttattggtaagagcttgtccaaggacctgaccttcaaatttgacaacaagaaagatttcacggaaatatgggccgtcatgattattagattgatccaccatgtggtagagttgatttcaaagggtaccaaaattgattcgttatccaaaactttagttcagatttcaaagttccatgcaattcattctatgctcttgacataccaagacaagttaaacaatgaatctgaagcatcagtaaaagatgcttacacgaaaggttacctatggaagctatatgaattgttttctttgtatttcatcgatcaacatcttggtgaattccttttgttgaaagttgtgacgtcagatcaaatgtcacaagtgctacagccaagattattgcaactattacctgaaataaggaaagaatgtatagcattgacagatgcctttaaactaccagatgcgatgattaatgcccctatcggatattacgatggtgacatttatcacaattatttcaatgaagtgacaaataataacaaacttgaacctgacggcgctggtagaccaccatattatccattattaaccagcatgcttggtcgcgacgattttcaaaacagattaggaggttccttcgaatcagaaaccttagattctttattgaaataattacatacgcccttatttttttgtatcaaccatgtaaccttaatgaatgtaatgaaaatattatactgctctgttaataaggaaggtgtaagacaagatctagcctcaattcaaaagtatctcgtttcagtggatgatgtatttgtgtaaacataaaaccagcccctgatacgtatcaaactttatatttggagctcaaagttatttttcgattctaaagcatgtgaattatgcgtctattgcttttcatttacataaaaaggcaattgaccgttcacgaaataaagcattcccccttagcaaaaagtcctttgggatatttttagtcgatatgtatcaatatacactcagccaagttaattcgtatttatcgagccgcatttaccattgcgattactaaacccttatttacagcaatccggggagtctgagttgcaatattagaggttttccagaatcaatatctgtgatcagaaaaattaaaataaattataataaaagctattggattatttaaggtttcttttattaacacgcagtattttattagatcaagctttttttccaaacaaacaattgaaagttttactgaagtcttcgaatacagaactttgggtaccaactgtcaatcaacttttcgttaaaggtaaattcaaaataccattttagctatgtcaagtcgtgttccggatctgcgcaacagtatgagctcttcgcagagtaaaaatagctctggtagcgcattagtatcggatgctgaagatgattcttttgtttcaagaagaacaccatcaaggagaccaagcagtattttttctttagataccacgccattggaacccccaaatgaaattgatatcaagaagttcactagcgatgatttccacttcagcatgataagaaatctacatctggctgatttcatcacaatgctcaacggtttcagtgggttttattcaatcgtaagttgtttaaggttcactttgactggcaaaccacactatgtccaaagagctcatttctttattgttctagggatgttcttcgattttttcgatgggcgtgttgcaagactaaggaacagatcatctttaatgggccaagagttggattctcttgctgatctaatttcttttggtgttgctccagcatcaattgccttcgctatcggattccaatcaacattggacgttttattcttgtcattctttgttctttgcggtctagccagattagcaagatttaatgtcaccgttgcacaggtaccaaaggacacctcgggtaaatccaaattttttgaaggtctaccaattccaactacacttttcctagttgctgtcatggcattttgtgtgcataaaggatatattacggaaaacattccatttggcatctacggagcatccgaatggtacgagttccatcccgctgttctggcgtttttcatacaaggttgcggcatgatatctaagagtttgaaaatcccaaaaccttaggtttcagaagacgaatttatccatcagcacctgttctatagatgtttagaatatctatgtctcaatctgtgtttgttcacacgattgtgcgtatgaaaattgttaaatagttatgattgttccatgcaagtgaacaaatatcaaagatcaattctacgaaagatattactgaacccaatttctgccaccatgattgatgtaatctattcgattttgcaacctaacgcaagaataagtctaactccataaaagctttccgaacaatcgagcagcgaaaacagttattacaaaatagtcagtctttcccacatatatattattaaggagctttttcaatagacaataatttatcctctacttatagtttgctaagcagctctttattcccctattgcacagacactggcagtatgattgattaacttcaaaacttcccttaattagggtttctaatgaaacctaacccaaacttaaagcaacgaattcagaattatataccccataaaatggacttacaataaaaatgagctgcggtccaatcaacttaccccaccaagtttattctcttttatccacagtttcatttttaatactggtcttgttctcgagcgcaatgagatttttgatgatattttatacgtggagcgctgtcattgccatgtcaatttattgattgaagtgcaacgcctttggacaaagaagagaataactttacaggacaaattaagggaatactagaagttggaatatatgagtataagatataaatacaaaacaggagagcaatcattttgaagtcatgatttgtatgggtaggtattgtgtcctggttggtaaaaatgcgacattgaagttgtctattttggtaaaaagtaaagtagctagcagtgagttttatccagtagaagcagtaattgcgttcaaacttgattttactagacctgcatattattcaaagaatggattgcaaaaaggattatcggtctggatgaacctgttgtaaatatgacatcttttgagcatagcgccacatatgacgaaaacgagacaaggaagcttgagcaacggctaggacatcacagcagcaaaataccacgtgttgcattagattgtaacgtgaacaataatttactggatgatgacccttttttcttttatattaatgacgctgacgaattgaactatttgaaaatgctaggagtgaacgtatcccccgagaaaattgaagaaatcttgatagaatttcgggcacaagtgctagcattagatactatcaataccttagaaaggcagcaaaattatctttctgctgaagaatcactttctgctctcctttataaagaagcacaacgaccaccactgaagactaatagttacaaacatttgttcaagaaaatccttatattctggcgtaaacaccaatatgcgatgaatacagacatatctctagtagattcatcggtaacttcttgttcatcttccatttttccacaaagagtacaaacgatacagcatgaaggatcgtttttcagtctcacgaatagtctcatatcaccaaataaaaggaaaaagacgtggtttatacaaggacatttgaaaaagcttttcaagctacaatgaacaaccaaaaaaaaactgtaactcaagtttaagcgtttgatatagtaatgtttttacttaaatatctctatcttataggttatcaagttcgaatgaatcgtcatcagtgttaggcacctttgtataaccagatttgttttttgctggtttgtccgcagtagagggtgcctcgtcaatggataacttaaaatcatcgccctggttttctatgtcatctgcccatgcaacggatttgtttgatgaaggtggcctattttccggatctattagaatagcatgtatttgctttctgaaacgttcacgcaagaaataatatgcaatggtaccggtaattgagaaaacgaccagaagtatgacagcgatttcgaatttatcagagttccggtgtctatccttgtgcgagttctcatcttcatcttgtttttgatcagctgacaattcctcttctcctgttgagtggtccgagtgtacaacgaagtcttttgagataataacatcatcttgattgtcttttccgactactaactctacatctttcaaatagatgtccataatacctctgctgattaaagcattatcgtaagggaccatatgcgatgcgttgtacacggaaacatacgtcaaattactttcgtgcttcacaaaacctgcagaaattgtgtcatctgtaaactggtcgtagtattgccagtcatagtattcggcatcattagtaaatccggtatgattgttccatttcatatttttaatcaaatcctgcacaccccttgagttgcaaatgatatccttatcaccattgaacaagaaaatttgcatgtgtttcaatagattgggtaacaaatgaatcgaaggctgggtgttcttgttcttcaaatgactgctcaccttactgtcacattctctccaatgtgggactttatcaacatccaaatgtaacgaatccatcacacctggcttacccaagaatttagaaacgctaggtaaatcatctggccagttgcttccacaagctgggtaggaatcgaataatctaaaatcatatatgttcgtacactcctgatttgaaggaactttattcccattttcatctgtctttctgcgggtgtaataaaggattttggtcaaaatatcttcacattcatcaaaggagaactttttacctccattattattgactaaattttgacaacgactatgcatatttaataaatcagggaagtaatcagccttcgttgaaattaagttattctccaaagcaaaaggaatgtaagataaggattgttgatcaggatcaatccaaccatttccaatcaacagactctttaaattgtacttcttaccacttcggctttcctcctcattgtcgtctttgtccaatttcgagttgaactttaggatttcattagcaaagaatggaatatactgaccagcatacgattctcctgccaaaacaaggtctttatccaaatcatcagggaaaatcttgaagtagttctttaaaaacttcatgaaatgctttgaaacttggttcaaatctttatcatatttcgaatcacctaccgtggaaaagccagtaccagcaggttgatccacaaacacaatatcacctctagtgtgccaagaacccggatttaaataggcttcgccgtcgtcatcgatccgtaacgcacctgattccataagagccccatctaaagatgagcatccaggcccaccatttaaccatataattaaagttttggatgcgacgacagacgtctgatttgcgaggtcatggaacttccaaaagaaatagtttttctcatcatcatcatcatcatcatcaccatcatctaagggaatatgacctgcatgcatttccgggataagttccttatctttaacgtcatttaacccaggcaacaaatcgggggccactaaatagtccttggcatttggaagacctcccaatgcacattgaatgagaagaaccgtttgaacaaagaaaagccaaagagacatgacagcactctaattatattctaatgattgttgtgattcatccatgaaaccttactgttaatatcagcaagagagaaatgataaaaaagagaataaaaaatatcgagcgagagtcacagcgcaaccttttataacacaaatacggccctataaatgtctaacaaactgaaataaacagcgaggtctgaaccaaataggcgtttttaacgttgattcaccccagcaaaaccatattcctaagtaatttcatttttaccaagcctttatttagctttaatatacacgaaactttcaaaactggcactggcagtatatccctccattgaaaaagaaaatctatgtaagcaaaaaacagtcacgtgatatatatatatcgcgtgactaataccaaaagcctgttaacatgaaaacctgtcaacgacaaaaggaaatacatgggtcacaatttccgtggtaagaagtcacataataggccctgagtcatggatcgaactctccaataccgcaactaccccatagttaccgcaactaaccgtactttaccgtagttgaaaaaagaaaacgaaacaccgacagggcaaaaagtcaaaccaggaaacccaatgcctaaaataacaaagacatttgcctcggaaataacagcatcactaaccgttacttaccgcgatgctgaccactgcatggcatattctcattgacaccttaattacagaaatcaacttaaaactagaaaccctgtgaagaatagtcacaagatctaaagatattacgatgtaaagatgtagccattccagtcgttatcgttaagtgacaacctttatctcgagcactttatttttttccctctattatcagtcttacgcagtatgctctctctaaaacttaaaagtctgtacctaattgcagtcaaatttctccaaagttactttttcagctggaattttttttttcaatttcagttgagaaatttaccagtatggtatatgctgtagtgaatcatacagtattcctcatgtatatgttaatatgtgtatatataagcagctgcgagatgaaaagatagaatagacattcgcgttatgaaggattagtttgtgcagtttacacagttagatttggtttatacactgtttgtaattcttatatactttagatatattatcttggcttagcatcaaaccaatctaaattgaaccaaaagctttcaccgagaatacatattacatcatgactcaaggtgttgctaaggatttttcacacttgtacagtgatgagactaaaagtcgtatgccttctcaattgaagtcaattatacattatttcaatgatccaaacttgatctttttgggtggtggtttaccaatgtctgattacttcccatgggataacttgactgtggaatctcctctaccacctttctccaacggtatcggtgccaaaccatctggggatgatgccgatacttgtcagattcatatcaccaagaacttagaggaatctcaaaagggtgtcgatattccattgtcaagatctttgcaatatggttactctcaaggtcaacctgaaatcacgaagttcttcaaagagcaccattctttgattcatgacatgaagtacgagaattgggatgtgttggctaccattggtaacaccggtgcctgggaatccgtcttaagaattttctgtaacagaggtgacactattcttgctgaacagttcgctttctcatcttctattagcgctgcggaggctcaaggtgtcaacgtgttccctattccattagatgaacacggtatcattccaagcaagctagagactatcttggataactggaccgagggtgccgctaagccaaaattattatacactgttccaactggtcaaaacccaactggttcatctttatccttcgataggaaagaagaaatctatcgtattgcccaaaagcacgatttcattatcattgaagatgaaccatactacttcttgcaaatggaaaaatacgaaaaagatccggcaaacagggttgtcaaatcctacgctgatcataaagagttcattcaaaacttggaaaaatctttcgtctctattgacaccgagggacgtgtattaagattggactctttgtccaaggtcctagctccaggtacaagattcggttggatcgttggtgccaaagacatcttggcccgtatcttaagtttacaagaaatgaccatccaagctcctgctggtttcactcaatcgatcatcgctggtaccatgaaccgctggggtcaagaaggatacttggactggttgatcggtttgagacacgaatacaccaagaagcgtgactgttgtattgatgcattgtacaaatacctaccacaagtcgattacatcaagattaatccaccaatcgctggtatgttctttactgtcaacattgacgcttccaagcatcccgaatttgcaaccaagtacgggtcagatcctgaaaaagttgaaaaggctatctttgacaggtccatcgcttcaggtgtattggtcgttcctggtaactggttcaagtctcaaggccaaaccactccacctcagccagaagcttctttcaaatccgaaaaacctaacgaaatattctttagaggtacttacgctgctgttccattggataagatgactgtcggtttgcacagatttggagatggtttgtacgaagagtttcaattaaccaaataaatactttagtcttagtacataatgccgaatcgttgctacgaatacatcctgataaattgattacccttgtaagtattcccatttcttcaacatcatgtaataaaagcacttactgaataacaaaccgccatgctcaccagtttatctttcctttgtaaacttgcacattttactatcaatgctcttatgatattggtttaacaaatagaaaatcgtgaaaattgtgaaaatatatctggtatcagaaagacattagatgttggataaatcaactgtatatataaaacgtagatgaaagatgtatgtatacaccgcaaactgtagtaaacgtagttcaaatgagtcgaactttatggaagattacggtttgcttgaatcgaattaaattaagataaatggaggaaaaagccaatacttgaaagagtttcatgtactgagcgatgagagactgaaatataacaaagtgttcaatcaaagaccaaattacctgggaaaaggcaactaattacttcattttcagggtatgagagattgtaacccactacatttgcaaaaggagaatatttcacagaaggggaggaatggaagtctctcaaggccagttttaacacccagcgccagcagtactttatactctttccttatgttgaatttcttgcttgaaatttagatccgaaactggtccagccgcgacaatttcttcgaatgatatgttattttgagattcttcatcgtcttgttctgtacccgtagtggataatctcaactcaccgcccttgttctctgggcccaaaacggttacgatcaacaagtaagcgaacacgcatcccatgaagatacacatcaccttaccataatcataagcgtcctctctaccttcaagtgggaatctttcaccaatggaggcttcgatagttgaggaggcactagatatcatattacccaattggtaagcaacaccagtgatcaaagctctgaactccgttggggctaattccgtcaaatgaattgggacaataccccaagcaccttggacgaagaattgtaagaagaagactgaagcattaattccagatttattagcaacaaaaccccatgggtataacatagcaccaccgccaatacaacatacaatgatagagaatctacgaccaaagaaagaggaggcatgggcaacaatgataccaccagcgatggcaccaaggtttgcaacagagtttgtaacagttgatgcatcagcggagaattggtattgagaagtcaacattgttgggaaaagatcttgagaaccatgggaggagaagttgaaacctgccattaaaagaaccaagtaaatcatacttagccaatattgagaacaggcaagcttagcattcttccagaattgagacttcccatcgttttctaatttttccaaacggactctttcgacatagtgttgggattcaggtaacatcaacctccaagcaatgaaaagcactgggggcccggcactgaaccagaatatagctctccaaccatgtggagaattatcaacaatagctctttggaacacgacacctaataaataaccgaaagcataaccttcttggaatataccagaaaggatggacttagccttgtttggagcattttccaaggcagtggcagaagcaacaccaaatacagatcccataatgataccaaagatagctctacaccccaagaaagcagagaaagaattaacgaaccctgtaccgatttgaataacgataatgagagccatagttaaaacaaatgagtattttctaccatatctgtcacccaaataaccaaagataagagcaccgatgacccttaatagcaacaccaaagtaatggcatgagaaatatcttttacaggtctgtctagatccttggccaaatttgtcatgttcaatgaaacggcaaagaaatctaacgcatcccaagtccatgctaagaacccaacgataaagtattgtgtttgcaaccagttcatcgaacgtaaggcagggaaaggatttatagggtattctttccttgcttctctaatcgatgcttttgttgggaacaaagtaggtattcttgtagccaaatatttcttagcatcactccatgtgatcctagattgcggtttcaaatatgtgattctaccttctgctttttcaagtgaagcgatggattcatcgcgagacactattgattctgcagccatggttatattttttttttgatgtcgaagtctgtgagtttcttcttgttatctagttctatatccatcaaaggtttaacccaacgtgaaagctcgaaacctgaaccgctgcgattaagatttaaatatcattgcccttatatataaacatattcaaatgagtctttccacgttcgatgtaagaatgacgcgaggataaaatgagatgaggcaatgcctacttgaattcctcttccccgctacttgacattaaacattccaatctacttctccaaattgaaaacactacaagttctacatatgctactagcgatcgctgcatccggttgtggaattatcaacctaataaccagcccaacaattactagttccatgttgaagcaaatactccatatggtttgttacaataaagcaaggtactatctaggtcaggcaagaaaaagaagaccataagttacggcccaaaggtaaaactagatcagtaagatcaattgaggaaacaagaagggaaataatacgagattaccaactgcatctggtcagcaaataccttcatcaggtaaaatatgcaatgtcagttttcccttgttccagttgagaacgaacggcattctaagaaagaaaaaaagaaaaaaagctaaacacaacgcaataagccatacatactcacaatcccgaagctatccgataagttcagattacttctgccaattgcatcattgatcagaaccctgttgctccatccctaatctctcctcagcttactcacactgatgagactgttcaaacgcttttttcagcgacgctaaaagattagaattgtttgaaaaagaaaaaccaaaaaagcagaaattatggaccggctaatagctatttgtcctacaaggccaggtaggaaacacaatagcttatcactcgatgagatgcggccgagaagaagatctagagcctagtctttgtcttttcttctccgatgttaagactcagaaaatattcacaaacctagacttagtcttcatatattgcagacatattgcaaacgcactctaccttgctttctgtggtgaactgaaattttgatcatgacgctttttcctgatttttattaaggttcgtaagagttttgattgagctcaatcaagatgtggtcggaaacatgggacatccgggtaacaaatgtggttctagtggttttattgtgacccgccccagtttacttttgggctccccgggtgttactccatagcaaccgccatctcgagagagcaccagtgcctcacaagaaattctgagatgagggtaacactaaccaatggcgggatgatacttgattgggtatgtcccgaacttagttgccgttacgagaagcagtatggaggtaactttgaaacgtttatcaaaatgaagtgttcttgcgattgttgcagttgaatcttccgtatagatgtatgtgcggacatgaatgtttattgtggggtacaaatggctaatagaaaggtaaactacaaccacaaaccacaggtaagcatatcatatatgcgactaggtctatgctatctctcgtgcggataacactgtttgctaattgagaatgtattgtataaaagtgattaatgaatttatatagtgataaagtcaagtattgtttagtagtgtattataagggtaaacctctggcggggatttgaggaggttctaaaaaataggaggaaaatcagttggtcaagggttcgacgttccatatttcgtcggcgtattcttgaatacaacggtcactggagaagaatccgacgttggcaacactcaaaatggatttcttcaaccattctttcttgttcttgtggtacacttcgtcaaccaaagattgggtttgcaagtatgatttaaaatcgtcgctcaccaaatagtagtcaccatgatgtctgatagattcaactaatggcttgaagtcaccatcaaaggtgccttgttcgatgacttggaacacttcctccaattcttgtggtaatggttcaccgtggtattggtgttgatatcttaactcttccacgttttctgccaagttaccaaacaagaagatgttatcttctccgatttctcttgtgatttcgacattggcaccgtcaacagtaccgatgattaaaccaccgttcataacgaatttcatattggatgtaccagaggcttcagtacctgcagtcgaaatatgttcacttaagtcactggctggaataataatttctgctttagaaacgttgtaatcagggatgaatacaactttaaagatgttattgatctctttgtcatggttaacaacatcactgacactgttgattaactttatgatcaacttggccatgtagtaacctggagcactcttaccaccaaagatggatacctttcttgggtacttcttctcaacttctgaaattgggacgccttgcgataacaactttttaatactcaaatatctgtagatacatccgaaaatgttcatttgttgacgtttgtattcatgaatacgtttcacttgaatatcaaacaaggtgtttctgatattatctctctggatgacatcttctccatcgtataatttttcgatcaaatctgcaagtctttgcttgttgaattgcttgacgtcgttccactgactttggaagtcttcgtcttcagcaaattttgccaactctgttagctttgacatgttcaacaaatagtcatcttgaggatcaccaatagccttactgatcaattcaccaagttttggattagcttgtttcaaccatcttcttggtgtgataccgttggtaacgttggtgaatttacctggcccataaatcttgacgaaatcttggaagatagtagtcttaatcaattctgagtgtaattcagcaacaccattaaccttatgagaaccaacaatggctaagaaagccattctgatttgtctttcctgagaggcttcctcgataatggaaactctactcaaaagatcaacgtcccttgggaacttgctttcgacgtgtttcaaaaagaaccaattgatatcgtagatgatttccaagtgtcttggtaacaaatgtccgaatagaccgataggccatttttccaacgcttcttgcatgactgtatggttagtgtatgcaaaggttttggtaacaatgtcccatgctttgtgccaatccaaatgttccaaatcgacaaggattctttgcaattcaacaattgccaatgtaggatgagtgtcgttcaattggattgcaacttgatttggaaaatcttcccaggagtgtttagccttcttaaatcttctaacaatgtcatgcaaagatgcggcacaccagaaatattgctgtttcaatctcaattccttaccctcttggaagttatcgttagggtacaaaacagcagtgatggattcagcacgttgctgttgttcaacagaattcttgtaatcaccactgttaaacttggcaaaatcgaattcagtggttggtctagcagtccacattctcaagttgttaacattttcggtcttgaacccaggaattggcatgtcatatggaacagcaatgactctttcacctccaatccatttacttgcacacaatgtagagccatccccattgttatctgacctatcaacgtaaccgtagaagttaattggcacttgaatttcacttctctcaatttcccatggattggcaaagtttaaccaataatctggggtttccacttggtaaccatcgataatcttttgagcaaagataccgtactggtaacgcaaaccataaccccatgccgggtagtctcctgttgccattgagtcaatgaagcatgcagcaagacgacctagaccaccattaccaagagcagcatccggttcttgctccaacaaatcttctagcttgaaacccaactcatcaatggcgcccttaattttttctcttttctcaacaccactttcctcagaaccatcttgtgagttaatcaaagcgttatccaaggctctacccattaaaaattccaacgacaagtagtaaaccctcttcgagccacgcgctgtttgtctctgctgacttttgttccagtcaatgaccaagttgtcacggacactttgagaagtggcttgatatgcagctaaatcatcacaattgtacaaagaacgagccaatgtcgtttcaacgtgttgaatgaatttggactgaaattcgtctggggtttcaaacttcttaaccccatgttttttccaaatttctctactctgcaaaggaatcatagtattaatactcttaatttcctgaggcaaaaacccagtcaaacgacgggaaagacgaggcacaccatgaggctcgtcaaccatcatgtcattggatgtggaagtgctcaagctaggtcttctagcagtaccggaacccatcttggcttatcttttcttattcttagtctaaaaaaccgcttgcaaggcccttaaaaatatatatagcttcctttcaagttaaaatagtcaatcaattaactgctattatatttgataggttggccttgaacaattgtaacaattgtatctgaaactttcacaattcttcattcaaggtggttaaggctcccctttctttcatttcctttaagacatcccttttcaatggttcaattggcatttaaatgcaaagcggaaaaacaaaaaaaactgaaaagaaactattttggtggatggcctgactatggatgtacgagtatttctctagatataactaactatttacctataactacatttaattcgttttcgaatacagacaaagacgcaacccttaatctatcagagaccgattgttgaatccatgtgcgacaagtgatatcaagtaatatagtttatccctgttgtcaagttatgaggtccaattactatgttacttgatctatgttccatcgtttaaaagttagaacgaaaatcctctatgcacatgttaatctccgtactaaaccttttattccggcctcttaatgcaatatgttctctattgtttccccacgctttcagaaaatgtagttttgtacgttaattacaaagcttaaggggcgacgggataattgcttatggttacaacgtgacgaagagtgacattcctcgtcaaaaggtgaactggtttctcttatacaattagcgtagtttgcaacgtgatcggcgttctcttgagaattcaagcaaggcacagatgtgaaagtgaatgtgaaagtagagatgtaaatgtgaattaagtgaaatatctatttatggttacaaatttcaaagatagtgcaaatggtcaatttagttgaattagtctagttagtaagttttcattgaggtgggttaggggtgatttcatctagaacactacagttcggatgtatcacatacactgtcttggcatttgaggattcgacatcggcagatagatcgtcgttttgaccatgtatttgcatcaagaccctgtcctttaccaatcttttgatgactttgaatgccaatttcctttcttgccaatattctgcttcggtgttgatgtcgttttctttctgttgtaaataccaatctactatctcagtttttgtcatttcaggttcttcattcttttctctgtcaaccactttccgtacaattagattcatcatttccacgtatttatcatatgatattgcgactttatgtgttgtgtgatgagcgttgtcatgagactctacgtcaggaccaccccccgtttcggagtcggcgttcagtggttgagaaggtgactgagattgtgtatcaagtgtttcgccgaagtgttgtgtggcaggtattgtgccctcaccctccgtactttcttctggggagttatcgtcatcttcaatttcaacgtcatcaacatcaacacggatgatactctgtctcaacaaatcgtacgcctcagcgacaaagctcggaacaatttcatccacgcaattagcacgagcaatagcttcacttaatctgattaatgattccagttgtctgacagttatacggtacgaagatttactgtacccctgcgcatcgtctttccttagttctgtatatcttttgactaggtagtcacgagcttctttagtcattaccggcttgaaagtcttggcatagttgatataacgactcaattgttctgctgagaatggtggattaatagcagagtccctcttcatgtgcaagtctacgatgtgggaagctagctcagtatcgatcttctcattgcaatcatcaagaatgacaaagaataaatcgaatctggacataattggtgcagacatgttcaaattagatcttaaagtcagtttcctattgtacctaccgccgacgggattagcggcagccaaaattgaagttctggcatttaatgttgcatgaataccagctttggcaatcgaaatggtttgctgttccatggcttcatgaatagcaacttgatctgcgatatccatcttgtcaaattcgtcgatacaacaaacaccattatctgccaacattaacgcaccagcttcaatagtgaaatcaccaccttcttcatctttcaccacagctgcagtcaaaccagccgctgaagatgctttaccggaagtataaacggctcttggagagaagttacagacgtattttaggaattgagattttgaggtggacggatcaccaacgatacaaatattaatgtcacctctcaatttaatgccttctacagtagttttatgaacaccgctaagcatttgtaaaaggatacctttcttaatggtttcatgcccgaaaactgctggtgcaatcgatttcaccagtttgtcataaatattctcatctttcaccatctcttttaattcattaatttcgtcagaatcaagccttgttaggaaaatttcttgatcagtttctgccgccatttcatagttttgatagtttctcaagttaatataatcaaatttggatgtcttatcggcgtcctcctcattaatcctactaccattgaaactggtaccaacattttcaacatggcatgccaaaaacgatattttgtaagttaaatctctaacacctaatgatttgagcccagaaatacctgagttcaatccttccgttgtccgtgagatacctctagaatctggagtcgaacttgctttaacaccaggcaaaccaagttgactaacgtctggaacgacaatttcagtaccaataaatttacatctatcacctggtttagctctttcgacacagtcaccacgaagaataatatctaaggttcttggcatagaaccggatggaatttcattggaattttcttgaattcttaccttttgccaatccaagaatttggacctgttcacgtttaatgaccagaaagattggttctcacatgttggatttggacaagaggttggttcagtgtacttgaaaacttgttccacattgtcaataacagctcgacacaattcgcatgtaaaactggctttgtataattctggtctaatttccgaagttctcgtgactgtgcctgaaatagccattaaagaaccaatcttattagccctaatatctctgattctatggacagttgggagattcaggaaactgatttgcaaaacacgttcaacctgatctggattagtggcaatggtagatggggcagtgcctcctgcggtggcagcctgcgaagttggcaaagatgaatctattctttgcgaagagcggtcctgagaattctcttgagattgagaaggaagtacagagtcagatgttaataataatccaggagcgtacttcttcaccacatttcttagcccagataaaaggaatggcaaaaatctgtaatactgttgtaaaatagcaaccgctaaagctccgtcttccacctcggccaaatgtttatagtcaacgtatatggtattcaattcgtaccatctcatatattcaatttggactctataaaccttctccatctcacctgtttcatcattgagggcggtgaaatttgacaagaaatgttcgaatgcctctcttacagtttcaccagttttatcatcaacctttttgatggcattcaagtttttctgcctgatcccggctaatggagtaatttcttgtgaatcattttccatagcctctatttgtgattctgaattaatgccttgcctagtgtcatcagtaccgaaatgtctatttccatctgacactcctctggaagaagatggaaactggggagttctgtttcctaacgactgatcatcgaattgtgaactatcataagcacctacactagagggaggctgggatgattgctgaccatgttgaaaaggacttgatggtgccgacattgttgctgattttttcagcttgctccaactatgtccggttttggatgagccgttcaacctggatgcccttcacattgaagatcatgttttaagtgtttcaacatgtaaaatcatttttttaatttctgagttaaggcgattcaatattacttttcctaaagaggtattgcaagtatccaaaattagttaactgaggtataacacgaggaaaaccattgactatcgaccataacatatcgataaccaatgcagcaaagttcaatttaatggaattttttctttttgattcgatagggagaagataaaacatcggtgaattgataataaaaattaatgatacgtaggtaagaattcatcttatttaagcgatataagtatatggacgcgaggattttagaaagctggccagggataaaatagcccccctgacagtcagttgcattaatggtgaagtgaaaatgaatctaaaatcgaaagaaaagaaaaaaatgtaaccagataaaataaaccgaaaatgttaatgtggacataggtccactgaaaagccgaatggaaaaagattcaatcattcttggtaattgtaagtataattgaaaaagttcatgaattgctgagtttctctgaagtgcctctcacccagagcgtactcattcatttgtctttgtaaagtagtattaatcttaggttcattcgagttattcgtgaatttcacttcttcttccatagacatgcctgcttgctcgatgtcgagggggagtacttcccaatcaggatttatttgtgacttttgatcggtagatatgaagttcatttctttatggagaacagtatgttcatgggaggattgggatgagatagaccgtacggtgtccaaagctgcatcttcaactggtgatttgttcaatgaggagaattcatcgaatggttgtgtacatttgcgtaaatgagtagctgtattttgagatcccgaatgaggtattagttgtggttgtcctgtgaaggggacagagttcgagggagcgagagatgggacaccgttgccatacacttggttttcgaaatgaccgtaattctgattgtcgttatgttcattgatatttccattgatatttccattgtagtttagtggtattgaagccagagcaaaagtgttatccaaagccaggtcagatatggtttgtttgatgggcggggaggcagaagccggtttagaatactcactcgataacttcttcctattttctggcatgaagttgctgataggcaccttggcttcgctgatagttgcttggttggaaatgaaacgtgactgtccatcagaggtcatgatcattttcaacttcccacactttttactcttcttcaggttacccttgaaagttggcaaaatagcttcacattcacgattttcaatatgatgttcaatccattcatttgtcgaatcaaagtgttttttacaacggccgcaatgtccatgagagttcacacggtccacattcttaacattatcaggataaatgaaatgccttgatctcaaatgggtcttataagaatctcttctggagaagccacctgtcgagtgacaacgtttctcagaaggtagagatgcatcccagaagggacaatgatatgccttttctatggcatgtttcttgatgtggcgagttaaataccctctcattttgaattctgcatcacaataatgacacacaaatttcatatctgtttccttcttctcatctgacttatcagtgggcacctgagactcactgtcggttgatgagacaggaacaataccactagaaacttctggtgttgaacctacagaactatcttctgacttgataacatccacatgatcattcaatgatgtcttcgaatcatcattcgcagacgtctctcctgtctctggagtagcgtcagtcttaggggtaatatcctgagtagttttcgtttcacgatcctcatttacctttggagatgtattctgtgcgaaagctctcttagaggtaacagggtcagtgtctatcgtcatcttccattccatttgaccttcgggagtccttgcaacggacattgggctttgtaatccattgatgttcaaagaacatggtatgacagaggcattatattctaactgtctgtccacattatgcgaggatgggaaaagagaaatgcgcctgttgtcagtatcttcttgcgagttctttccattttcattaagtttcccatcttcaccttcatcttcatcttccgtttcaaaatccgacttattgcccttgtttctcacgtccatacttgaatcatcctgtaatgtcttacagtccaaagaaacacctacgacgtgactggcgatggcattgaaccaattagtcaaacgccaagagagtcgtttgagaattgacttatccgtatctagcaattgcacggaaggcatggctgattaatcaaatgcaaagtcaaataaacgctttcaataacaataagatggtataagctcaagttggaaatttcaaaatcaaaagtgttgaactcttagacttcagtttccttgagctttattgttttaacaatctgagtcaactattgtcaccttcgtttgtgataaatgatcaatggtattaagaccaaacaaaaaaaaaaaacaaaagaaaatccttcgggttggttacacttctcagataacagtcaaagtaagtaatttatggatatatgcaatattcctagttgatgttataaaaagaataattagaaagcaccactaatcgcaactaacttgcactcaaaaggccaaaatctccaattattgattttcaatcttcaactttcattatcaattttccttatccatcattctattttttccctctgattgccatggtcgcagcttttttttttcattttcatgagatttctctttcgaaaaactgaaatttctgtcagtattaatccagacatgctgctaaacgggccggagaaaatacggagatacttatcttgaatacgtagttagttgtgttcttcgtgttaagtgatgtgctcatgttgatcgggtaatatattaatcatttgcactctataagagtaatgaaataactgtctgctcagggaatcctagtttacagtctttcggatgcaacgcacgtgatctcattcatatatggcagtttaagcatttgattctaaagtccgaagctggcattagaatacatctaaaacgtgtaaattgagtagtgtacatgtttaatatagtttacatttcgagtaaagctgtctgaagcttataggaagctgaattctgactttgtgaattcgggatttgatatggttattattcaaatgcatatgcaatggagtgtttagtttatacttcatgcaggagagaaaaaaaagagtgtgagatgaaatcgataaaggatagaatgcaaatatggtgaatgatgcagattcacttatttggaattacccattacggtgtcgtcacttttgtttttagtgggttcggtaatggtacctgatgttagctctggtaggttagattcgattgattttctggaattcaaggaccctaattcccatacagtcgccgagtctccactgatgttgtcttgtaaatttgaccaaatatcaccatcatgcgtagatgtacatgggggttcatcggtttctactagttggtagtcctgttgtacttcttgtagtctttttctttgcatgtatctgtagtagttgtaatagcatacgtcgattagtacaacaatcatgcctaaccagttgtaaaatcctagcctttcattgaataccagcatgcctaagaaaacggtgaatagttctttgatgatcccggtgacacttaaagttaatacaggagccaattgtaatataccaaactcacacattgttaatatgaaaacaaggcagctagggagtgtgagaagcgctaatccacgtaatagagccgcgagtttcgaatgaccttcccaagtcatcaattcagaatgcagtacatcaggaatcggacgttccactatgaatgaagtggaaaatagaagtatagtcattggtaaagctaattgatatagagtgatgaccgggtttttcttagtagcaggtttgtcagcagccatcaactcatcaccatcgttgggtgacaagacaatggtgttcttcttgtggttgagaataacttgaacgtagacccatctgaaccctcctagggcacaacttatcaccacaagtatcacaccaaaggtttcctgaatttcaccatgagtctgagagctatctgagtttattggttttaaacccatcatcacaacaccacaaaacatcaatgtcactataatgaatagtctccaagatggtacttccaccttgaatagacagccaaagaaaagaacgaatgcaatagtagatgatttgacaattgtataaacagtgaatggaacgtatttgaaggaaatgttgcctaaaccaatgtcaccagcagttgctatagcagttgggataatgtactttgcatagtacttccaatcacctttgttcaagttttcgggggttagttgacctttccaccggagatacagatatgccataccccataactgtgtttggtgcaagcctgtcaccaacaatgggtatggaatatgcaaacttctattaggatcgaacatccatttgttgtacatggtaagaagaatggctgcaatatacatccccatgatcaaagtgaagatcctcactgtgtctctatccatcttcattgtttttagctattttatattgacaaaagtactacgccaggcttcttctaattttgtattaatatctcgtctccctacagtagcaatgattcacacagatctcccagaacttccattaaacaaatcaattgacttcgaggttctatgttatttcattctctacatgtggtaggcacaaacctagttacgcatctttttcatgttgaacgaaacctattttcttcttagatgctttcctatggatgaggctggtgaaaaaaaaaaaaaaaaaaattaatgaaccactaacaaatgagactaggaccctattgagataacttacagggtttttatgaaccggaagccggaacgttatatatcaaagtaatcgtcgtaccaatttggctcccaaaataatgttgtttttgacatcttgtgccaccttgtcagagaatatcagaaggattttcccaaaagatacagaacaatcaccagctgaatataccttcaaattagtatgtaccagctgtagagaggagcacgattcccctattagaatcaataggtttgaatctcatgacatgcctggaagtaaaggaaatgcctcgttcgtgatgaaatgtaaattttgtggcaatgagtgttcaataaacttgaccaggactaaggaagacttatataatttagatgaagaatctaatttcgaattgattgaacagggtaaaaaggacagaaagaaggttggcttacgttctgttcctgtggaaaaagctgtttggctcgagcttgactgcagaggatgtgaagtaactaaatttgaacctgctgacactatttttgtagctgaactagtttcgaagaaggaaatggagtttcagtttgaagacgacgaaaacgaatggtatgattatgatgacgatgctggagaagaagtgagcgtagtagatatgaactttgaaattgtaaaaggcaaataagtagacttttgtttagtttacttttgtactttatttctttaacattatttacttgtaaagtatacatgatatattcatttcaaagtcccaccaacttataacatcatcatttattaacaatgataaagttagagtagtggtaatttattggatcattcctctaagttgacgtaattacttgggaatagacccttttcacctgatgattcaagttcacccaaccaccaatcatcatcgacaaattgaatattaatgattctttcattttcttcaaaagtcaattcattatcttcgccggcttcgtaatcatattcagcaatagctgatggtccggattctttctttccaggtttggatgctcttggtgctggagatggaggagtattttgagacttagaaaatgctctttcatcatcatcttcttcgtcctcgtcactttccggtgggggtggaacatttctcctagttggtagagaaggagcttcttcctcttcctcttcctcttcctcttcctcttcctcttgctcctcctcttcctcctcatcgctttcgggtgggggaggaacatttcttctcacaggcaacgaaggagctggagtttcttcctcttcttcttgttcctcctcatcactactccagtcatcgttttgttccttcttttgatcatgcagacctggtagtggttggccaaacttgttctgtttcttggtccagctgtcagatgagttgatcttagaagcttgaggtctagatctgctagagtcacttggttttatgataggaatttccttagttttaattgattcaaattttgatctgacctcttcaatctcttcttcagcttcttcttcttcgttagaatctgagaactcttctctttgggtcttgttctctaaattagatggtttcttttgtcccttcttttcagcccaaagttgagctggtgacttttcattcttgaaacccttgatcaccttatcgtcgctatcgtttcctgatgattgagctgaggaagaactctttggtcccaagactttgttgtattctgcatccctctttagcttggattcttgctttaatttagcaatctcagattgaggatcaatctttttgtcgtaattaggccccgaaacaactagacggggatcttctttactgttttcttcagcaatcactttttgtagatcaactttaccaattggtttccaggaagaagaatttggttctagtggtttcttgtcgaaatcacgttcttccaactctggttcaccccattcatcgtccttcttacctctgctcttctcagtctttgggggagaaacggatcttcttgatgggaacgatggtgtaggttccttttgctcagattgtctggatgaaacactgactggtttcttggctgtcttggcagcagaggaaattggcttcttggaggccggtgtttgttgttgaattgaataacgggcaccagcggagttgctgattttcattaacaattcagattcatctaagtcatcctcatctctggcggtaacctgaacatggtaggtcttaaacacttgattagagatcacaccgaaattctgagcaaatgaagctctggttttcaatggagcggaatctggacaccaaccaattaaaatcaacttctgaacatcagaacctggtggagaaacacgagctaaaccgtattgaaccttggtatcatcgaaactttgcaaaaactcgctgaaagaagtaccgactagttcaggttcgtattgtttcttagaatttggcgagatgatcaaccaagtagtatctggatcacccttcacaaccttcaggtactcggcctcaatggcacgcgagtgtgtagtagtgtcaattggttcaaatgccatcgtaattgctatgccagactgataaccctataataacttaagatcaataacaacaagaaaggaacgtaatgcacctcaaatttgtctggtaaattggcaaaaacacacactaattcaattgactttgcagaattcttgtcttaagatatttctatatttgtttaaatatatataaaggtaggatggtacaatcattccaccaaacagcagtggattgattcatgtttaataatttaacctagttcaaatattgcattcatggcgaataggagacaattgtcaagattttatttcataggttacccggaatatgaactgtggttttagtttcgagaaattcgtgcagatttcatttagagaaacagcggttgacatgaaaccgggtaatatttagtaccatgaacagcggtcagagtagagaacgatattgcaaaactgttattagctttatgaagagttttcttatcaaggaatcaataactattttttggaataaagctgtgatgatgtttctgttggaacaggaaattaactgtcggtgagaatttcaaattgctcgatgttctattaattattctccggccagatttcagcttattttccactacgaaacggaccttatgctgaaatcactgttgagttaaacattggttataatgatgggggccttaccacaataactgatcccggaacgactttccacgttcatgattctcatatatgcatgttaggaaactatgccatcgcaactctgagaaaggtactggtagacaagctccgaaatcgataatatcgataccggcaggtttgtattcactgacgcactatttgaaaaataggccttcttcgagattatacaagaaattatcgaacccaaggacaagattcagatcgagtaaatatcatatatggtcaaaatacgatttaatacaagccttcatcgatttatgggcgtatatgtaatggcaacaaatttatttctaccggtgatggttccttttcccccgcggctgatgacgatggtggggttacagacgaacttggttattcgaaaccatctactactttttctccactgcaaaaagaacttgtatccgattttgaagctgttaaattggcttttccccgttcctttggcctttatgacgcaagatgtaaataaaaatgtccgaaacttgtcacttagcagttatcaccgaagttgcatattgagtggagcattagaatcctatttcggcaagaaaatatcacagaaaatgggggggaggacggattaaggcttttcaaacaaactatacaacgaagctatgtataaggacaatcaattgtcgctaactgacggtcagttgcccatttgagtgtcgtttcataagaaaatacatgtgtggaatttgtatcacgtgactatgtctatgcgataccttcctaaattgtgggtgttagccaaaacatttgcaagcattcgtaactaatttagaatcttaaccgtgttcaaagagctttcaacattcaaattattgggacttttcatggaattacacatatttccttacattgttaatgtgctccccataaataagtttaaattcatacacgctgtggacttttctttttctgctgatgttaaaaagtgaaaagaatcttcggtgatgagatgagatgagatgagataatatagaatgattatacagataaatgacttatattctagcatcggaatatcctagttgaacgcataccgtacccaaacataaactgctcaaagaagatggtaacatttaattgtgaagtgtgtaacgatactgttcctaaaaagaacaccgaaaagcattactaccgttgcccacaagcttattatacttgtattgattgtaaccagacatttgatgacggtatctcttacaagaaacacatccagtgcataacagaggatgaaaaatatcagaaaggattatacaagggtaaaaagaacggtaatcagaatgaccaaaatggaaaacaaccgaacgctcaagtgaagaaggaagtcaaggtcgaaaagaaagaggaaaagcctgtcaagaaggaatctaaaccagagaagaaggataagaaggataagaaagacaagaagtcaagcctaatcaagggtgaatcattgtataaaatcttaaaatctatcaacaataaagacgacaaaaaagaattattgaagaggttgatcgtaacagcggaaaacaaaattgagctgcagtaactaaacgaacattcttcgcacattatttgtttacattattttacagatgatttcgtgaagaaatctatactagcgattttaaaagtacataattcattaaagagcgtgaaactatcataatcatcacacgctcttagacaaacctttagataatttattataaaactgattcaacgattttagcggaaaactgagggtctcgaacatatactcggggagctgatcttgtaactgtttcaattcttgtactgacctttgtttcaacaacggtacgtaaacaatctccgtctcatcgtccttccccttcacgaatcctaacttgtaatccattatcccattcttgttcccttgactggtatcaaaccacagccctagatcatcctcatatgtcttatgtatccttactccacacaattgctcgaataaatctttcattatctcagattgttcctctgcgtccgctttcgaatcctccaattgagaaatctttgtcttatcggattgcaattgttccttcaaagattctatctcctgttgtttcaactctaattgtctcatcagcttcacattctcgtttaacaccccttgtacggccaagtcagccttttcgaggcgatcctggaccgattccttatattctgctagagggtccataagtaaacaaaaaacacagattccgagggtggtaattaactatgttgtcagaagattttgattagatatggtccagttaagttattcccaattgctgctcgtcaaatactgccgggacaatggttttatctatataaaccatggtctcaatcctatatgataacaatatatacacatatatcttactatgagcataaaagcccaatgattgagatttacctcccaaaatatcaattccgaccccaacctccttacaccacaaatggcatcccccaataaaagtagcagttcccaggaagtcacgtgagagaaaagatgaatcttctttgaacaatttacggcgagaaaaggacaattagcatgatggttgaaataaagaaaaaaaacaaaaatgaaaagtctttaaatttaaacaatacctaatgtgtgtttgctgcaattgcacacacaatttcaatcatttactgctaccaccacagtgcttaaatctactgagcgacagcaacggtaacttcaacgttctaggctaactgtttcaattttggtttgaattacaaatttcaagtgctctctattgttttgaagcttggaatctgaaaacaatagagactataattcttatcgttttcaccaattatctcggcagaaagttttctttgagattagaaatttaattggacgattatacgttaatatctttgaacactggttggtgtcttactttcgtttgaattacgttgttacactttgataaacacacggggagtgactgagaataaagttagtattatttcataaatcaagatgagcagtgttgcagcatcgcaaaataaaatcaacgatttactggaagcaatcaggcaagagtttgccaatgtttcgcaagaagcaaactcttaccgtttgcaaaaccaaaaggattatgattttaagattaatcaacaattagcagaaatgcaacaggttagaaataccgtttatgagttggaattgactcacagaaaaatgaaagatgcgtatgaggaggagattagcagattgaagttggaattagaacaaaaagatcgccaattggcctctattgcccatggaagtaccgttggtaatgttccaggtcaagttcctcagcttagtagaaattctggtgctcagggaaatgctaacattgcgccaccaaatattccgcaaccaatggtttcgcaaactgtaggtactggtatggccccacaaatggctcctttgaacactcaacatcctactcagcaaactaagtctaatgctggagagcaagcggccgctaatttggctcctgtcattcagcagcagcaacaacctcagcaacaattaccaccacaacagcagcagcaacagcagcagcagcaacagtctaacatcccagttaccacggcagctccagttcaacctgctggtggtaacttagaccaaaccgtaccaaatagtatttctcctcaacaacagccaacagagcaacagcaacctgcaagtacagccactactgcaccagccactgcttctacagccccaccaacatctgctccatccgatcaggtaggtcaagatcactacttagttcctgccgaccaacgtgctgttcatgccaaaccaatccctccattcttgttagacttggactcacaactggttccttcacatttaaagaagcaaaacaatgactactatgttcttcacaatcctgctctacctacggatttggatgttgaactacataaatcattagaacattcttcggtggtatgttgcgtcagattcagttccgatggtgaattcttagccacgggttgcaataaaactacccaagtttacaaagtttccactggtgaactagttgccagactatctgatgattcagcatctcaaccacaacctcaacctcaaaatcaaacagtcactgccgaaacctccacttctaattctaatggatctagcgctgaagatggtactggaaaccaaaactcagcagcctctacagcatcctctgatctctacattcgttcagtctgtttctcccctgatggtaaatttttggccacaggtgcagaagacaagttgatcaggatttgggatttggaaactaagaaaattgttatgactttgaagggacatgaacaagacatttactctttggactacttcccatccggtaacaagttggtgtctggttctggtgatcgtacggtaagaatttgggatttaaccaccggtacttgttccctaacactatcgattgaggatggtgttactaccgttgcggtttctcctggtgaaggtaaatttattgcagctggatctttggaccgtaccgttagagtttgggattccgatactggtttcctagtagaaagactagactctgaaaatgaactagggacaggacacagagattctgtttactctgttgtctttactagggatggtaagggagttgtctccggttctttggatagatctgtcaagctatggaatttgaacggtctaagtggtcaaaagagtcatgcagaatgtgaagtcacctacactgggcataaagactttgttctttccgttgccactacacaaaatgatgaatatatactttctggttcgaaggaccgcggtgtcctgttctgggataccaaatccggtaatcctctactaatgttacagggtcataggaactctgtaatctccgtcactgttgcaaatggtcatccacttggccctgaatatggtgtatttgctactggtagcggtgattgtaaggcaagaatttggaaatattctaaaaagaacagccaacaaaactctacccaaatcaaagagattaaagaataattcctgtaaaggctacgactaatggccgtatttcagtataccttcgatggtattaattactctggttccaaatgcaatgcaaagaattcaaacaaaagttcgatatcaattcaagaggtaccaaattatacaaacaattaactctatcaaataatagaagctgatgtttttccattttcatttcacctttctgatttcgcagtctctgtaacactatgattgttttctcgtaagttttcaattattttatatcttttttaccgtcttgattgataatttataacatgaaaccttattttactcaagcagatcgcatcctgcagttgtttatgttcccacgccatcgttgacatttctgcttttgacaacatctttcggtaacaacagctttttttcattctatataatacaaattgcggcagtagaagtgtggatacgagatgaataaaatgctatgacgagatacgcaaatgtatggaacgtgttaccattgatggtaattaaaagtactgtgtgattatataagatattattaagttatgctaaaacagatttggtattaattagtgcgagacgatggcagcaaagcaagttaattgaagtagtagctatttcacaaaaaaaaaagcaggtattccactaaatttattggtgggcttagttacttggcaaaccggtcgcagaatcgattaaggataagtccgtgtcttgtggacctgggccaactctggttaaaattactctagttacaccttgatgtagttcagagtccaagtagaaagagacatcatccttaatttcatcgaatttagcattgaattgtgatagttgttctttggtgaacttagattcccagcctgagacgttttggaacagatggtacaggaatgcaaatagtttgtcttcactttgttccaaatagtacaagactgcatttggaccagcatcaaaagtataggccaccacagtctcattgtaaaattcattgatagcatggcaaagtttaatgactttcttggatgtatcgttcaagtagaagataggagggtaagaatcgagacaagtggcatggaacgagttggaatctttcattgtcaactccgcgaaagttgggaaatccttttctagtatagatttcttcatttgttcgaatctcttaggaaccacgttgttgattctttcctggaataggtctgatgttttgacagtcaattgcataccgctggtagaaggagtatccttcttgtcagcactaacaactaaaatagcagccttcatttctggccagtgattcaaagagccaatttcaacagctttactatcactaccatcttccaatttacccatttcccaggcaacgtaaccaccaaacaaagatctgcaagcagaaccagatccctttctagcaatcttagaaagttctgattcggattgagggagctcgtacagcttggcaatagccttaattaacgcagcaaatccagcggctgaagatgccaaaccagcggctgttgggaaattgttttcacttgcgatgtgcaatttccattgagagaaagttggcaatgatgaatctttttcttccaattcacgtctcaattggcgcaaatcttgcaaacagtgctgggttctttcgctcgctagagactcttccttaccgttcaaccacaattgatcttttgcaaaatctggtgaagtggtagccgttgtcaaagtacgtaggtcttcttgggacaaagtaacggaaatagatgagtttgttggtagattcaataccttatctctcttaccccagtattttaaagtagcaatgttgactggagcagttgtagaagcgctgtaaatagacatttttttgttgttgttagagatgatgtacagctaaattcaatgacccaatgcaagaagttttctgtttactccccctattcacgataaaaaaaaataggcttgaaaatgctaacggtgatcaaatataaactatccaaaatttggatttgaataattatataaagtttttttagaaacaccaagggatctgccttattccttggtgaatatcaagaaagtctttgggcgttacaatatatatcaactttttcaactttttgtcctgcttttccatgcgaaaaatatgaaacgagaagtttcgtataacgaagtcacgtgccaaccatcctcgtgtaatccttcgaggcacgttttggcagtgatgtatgcctccaaataaatatgaatattattagctatgcaaaccacctgaacatgcctcgattcgtgtatcatttgtagcctgaagattgaaagtatttcttcgattatgtggtcacctgactctcatttcctaactgggcactatatcccaaagtagtaatctggtgcctaattagggaattcctttcaatcaggttcaccacgattagcaaaattccaaggcttcacatggaattttaggtttgactatgcaagaagataggttcatcattgatggaaaaaaaaaaaaaaagaacaggctcctggttatggattttgattgtccgttcatataacttacatagtatctttgtttagggttgagataagatgttgtatctaaatggattagtgagaaatgggatcaatatcggtgtaaaaagaggtacagctgttgctttgctagcagctaaataccgttctccaatatttgctgcaactagataccaaagtaataaggtagaagataaactggctggtgtgtttactgaggagcaattgaaagaagcccgagaaactagattgaaaggtttgggtccttatgtttccaaattaccaacaaaattgattccttatgcggaactaatgagacttgagaaacccgttggaacttggttgctgtacataccatgtacatgggcaatcaccatggctgctatggaaacagctgctccattgggaagtactttgtggatgttagcgctttttggtgtcggtgcactcatcatgagaggtgcaggttgcacaatcaatgatttactagatagaaacttggataacaaggttattagatcagttgaaagaccgattgctagtggaagggtatcaccaggtaaggctgttgtatttttgggagcccagacagccatcggtatgggaatccttgcacaattgccagctgattgttggtatttaggtttggcatcgttaccaattgtcttcacatacccattgttcaaacggttcacatattatccacaagctgccctatctgcatgtttcaattggggctctttgttaggtttccctgccatgggtctgatggattggtccactatgattcctttgtacgtcagtacttatatatggtgcatgatttacgatacgatttatgctcatcaggacaaaaagtttgacatcaaagctggtatcaaatcgactgctttagcttggggtaaaaacacaaagaaaatatgtactgctcttggaacggtacaaatcggaaccttagcacttgctggattgaacagtggtttgttgctgggccctggattcctctgtgggctgggaattttcacatacaggttgtttgatatgattagaagggtcgatctaaatgacccagcagattgttggaaatggttccaaagcaatattaacaccgggataattttttctggtgctttgttcttcgattatattctgaagttattaggctggatgtaagaaggataaaaacatctttatttatacatcagttcctatttacaagtaatcttttatacatgtacatatgggcatttgtcacatttgttaatttataccatttaacaaatttccattattgtattcttaacaagcctgaaatgaatgaacttctaatttctcatttctttccatcttggtgatgcttgctcttggaatttaacacaatattcttaatatcagcgttagtattcaatcttggccttgctatttgttgttgaattattttctctaacttctgctcgttcttggtgtattcgttcttttcggtcttgaaatctttcaactccaactgagttatagattcacctccaaataatgcatccataaatcttccgtcagatccccagaatttacctgatctgttcacaatatagactttatcgaaaaaaggcgcccctttatccatcaaggagaaagaaaatgaaccacggtcctcaactccttgttcacctattcctgtaaatactctggatttttcgtgacgtcttaagtttcgtaatggaattgttttactcttttcaccattgaataaagtcctagtcgtcactttacattttgggatcttatcagggatgtaatgcatcttggttacaattctggtcggtatgtatagtgccactgcagctaaagtgaaaggtatcactgaaagaaggacagaacccgcagatctaccaagaaacgcgacgttggcattttcgtaccattttaaatctttcttcggttcttctgattcctctttatatagaccagatgaggttgttagtgaccaatccgcaaaggaagctccatacagtataaaagtaaaagaaagtgaatatgccccgaaagtaatgagtttacctggcttgtacgaatatatttgttctggggcagctttggccagtagagccgccattttcgtgctaaaagggattgacattttaattctaacaatttaacctttcaaatttccagatgcttcactgacccagtaaatctgagcactgatctctggaaccctggtgatatcgcagtcctgggtacagtttaactacgtacgttatgctctgcatgagctttaataatttttaaaagatatcaaattgtttcatcagcgaaaactcgattttgtatgggaaattctgaaatcccgatgattatgaatattatgatcggacatcacttgtgcataagaaagaataagtaggggtgcatgaaaatacactatgtatgcattgaatgtaagatatggaatatgacaatatctatataatatcgatagaaacttatttgttgaagtgtttaatcgcttcttccactcctcttgggtcagcaccgactaccttccccaatcctttcccattcttgaataatacaaaagttggcatagaagagatacccaaagcacccgcaatatcaggggattcatcgacatcgactttgtagaacttgacgttattgtatttttcacttagcttttgtacatgaggggcaacggctttacaagggccacaccaagtagcaaagaaatcgactaatgacaaattgtcagctttcattgcgacctcgaattcatgcaaattcgttagatgtttgatggtattcccgccagcagtagattggaatctaacttgggaaaaagccaatggtctcacgaaggttgcacgggaagctgtagcagttctcaatgcagttctggagatcatcgtaatgtctgtagcttgaattttatagggttggattttacagtagatagaactaaacctttctcgtatagcagtctacgttgattgatataattgataacagcaatgtaacaattgattttggcccggatacttcttctaaaatcaatccccgtctatgatttgtctcattcgacagcaacgatttttcattatttaagtgacgaaaagttatatcacgtgacttggatcaacactttttttcaattttcttatttggcaagcatgaatttggacctgacgctgttaatcgcatagcaactttgatcaagtagtttgatatatgagcgaagggaaattttcaatgaaggaaactgacgttaaggaaatatcaaccttgggaggatatacagttgagtcattatcaccattatataatgggatgaaaatggggacatggcgtttccttcaaaaataggaaatgatacgtggaagctggcttctcttgacttaagcttaatacagtaaagctcactcaagtggtcaatcgaatattagtagataaccgatgtctaaggacaggaattttacaggatgctgggcttgcagatttaaaaaacgtaaatgtgatgagcgtaagccaatttgttcgttatgccttaaacacggtgtggaatgttgctatgacgtgagattaagttggcttccagaaaatatgtatgttgttaaagataacgagttaggagtcatcagtggtaattctaatagaaggatgtccaaagagaagttcaaagaattgacgaatttgaaatatgatagtccaatatcagagagtgcaagtttcacaattagtgctaggagattcaaggtgtacgataattcaaggaaatgtgtgcatgaagataaccgtggtgccgatgtgtacgattcaaagcatgttgatgagaaactttccatatttttggatggattggaagaatccgaagagtttcaaagcggtccctttacgaaatttaagatacaacagcaggtttctgtgagaaaatgtgatccggcacagatattgaaatcgctatggcatgatcattcgtatcaattatcgaacaattggtgcctcacagaacccgaatatttacagaactttcagcaagatctacaaaaagttttactacggtgcgatttccccataaatgtgatcaacacgaattttgatgcagatcattggtcaaggctagtgccaaaactcccgaaacgtcatcaaagtgttgtcatgttcttcctttatgctcaaaatgtcaaaggttatcaacagattttgttgaattgggtttatattaaaacgactattagttctttagacttcccgttgttggttcaattgtgccaatgccaaagttcgaatcggtccactttaatctatttacgcaacttgattgctcactataaaccttccagtcgaaataatgagaatatttccaaactcataaaaatggaaatagagcaatacattacagcaattgacctttcgacgttaccaacacccatccttgatgcattcagtaacagcattgaatgggataataatgataattatatgaaactccaggttatgtgaacagcattgaactcccctttcactggcccgaatgttgggtcatttgtcaggtatattattcttaggttatataaaatcagcaaataactagcatgaacgtttatatgttgtctacttaatattttctaacgaacacaagcgttagcaatggaagcaactttgaaggcatctccgtttttgttagttagctttctaatttgttgagccttgtcatcttcatccttgaaaataacctcaagttgttcattagtactgaaatgtggttgcaattgttcccaaatcttcttctttggattcaattgttttataggttcttcatcgccgaaaccttcaaagaacaccttgtcaccagccttggatccagctgggggttcaacaaattcgacgttgttttcatcagaaccacaaagaaccatagcagtggatttgatacccctcatattaactggctttaagttgcaaacaacaacgacataacgttcttgcatagcttccaatgggaagtatttcactagaccagaacaaacggttcttggaccctcttcatcaccaacatcgatggtagaaacatatagagagtcagcatctggatgcttgatagccttttgaatgaaaccaacacggaaatcaattacacctggagatggtttggcagactcttgggctggtgcttgggcttgttgggcattggcggccttcttggcagccttctttgccttagcttcttctctcaatttctttaaagtttcttcatctggcttacctcttggttgtttatcggccttaccatccttctttgctgctgcttcaccgcccttcttggaagcttcagcctcgtccttcttatcttccttcttcttcttttcgatgacttcacgtggaagatccaaatcaatgttcaaagtcaagtcgttcaattgtaataaatcgttcaagtattgtgaccatctaagaatatgtctgtacttagcatagttacccttgacatctttagaagagttgatcaactccttggcaactggtaaaacatgttcgaacaatgtaacatcggagacggttggttgagcagtacccaaaacgaaagtgtgatccctcaaatgtagattcaattcctcaaaactaccctgaatgttcccagacttggcaacggaatcccattgagcctcaagagctttttgctcttgggtcaacgatggcgcagaaattgataaagcttcaaatttgttcaatagatcacaggacatctcttgctagtttctgtatggctaaaacaaacagggattaatgtaaaaagaaaatgtgaaaccttcttaatggattaatttctagaacgtaattaatagaaccagtaaaagcaggtgaagccgtattatggatgtatgcaccgcatgtaatcttgttctattggcatttcttgcctaagtactaaaaaaaattttggacattctcatagtcagaaagttggaaatttctgtcacgtgagaaatattaaagttctgatcagtgcattgagtattggttactgtggagattgacgtaaaggtgaattaaaaataaataaccaggtaacgaagacgtcgtattatctatgtagcagccaataatatggcattaagtgcttgaatatacatgactataccttttcaataagaagactcaacaaatgttgtaattctctcaggatctgtcgcttcctcctgcttaattttctaggtaagttttcgcttgatatatttgaaaagctgaaaaatcgatgagtcgtgcatggatgagcttggaataatggaactttatatatatatactaaagaagagaggatgagaacaaagttaccaacctatgtagcattttttttatataaacaagtgctgatataacatctgtaagatactgaaacagttacggtgtttttatatcttgtttttgccgttgtgtgaggcctatagaaatctgagttccttggatagctccgactggcgaattttttgatattggagacaattgtccggatgtctgtcaagaggaataagaaagtcagtgtggcctgtgtacactgtgccaaatcccacgttacttgtgatgacaaccgtccatgtactaggtgtatacggaagggattggaggaatcttgcatagatgcaccaaggaaaaaagtcaagtacctgcgcgatgtgccagaagatcaacttccttctgtcttaaggtctactaaacaggtaccgcctgtaaatgctgttaagctgaaaatggaacctggcattctgccgaacataccattagattatgatggtggtacaatccgacagtctgctcctgccaataacggtaagaataatccggagacgcaacaaactctgagcaacggtcagatcactcacaggcccaaatttttgtctagtgcagcagatttggaatactctattctatctgatatcattcatggggactctttgtttaataagattcctgtcaattttctgtattctaatcctacagagaagacaccaagcccgattaaccaaggatctctgaacggtcagcaagatctgcatttttcattacagctgcgatccaaacctatgaatcagataaggggaaatacaagagcaatatattctaatcttttaggacctgtttcgcatgagattttacagtcggaatttaatctctataccaatcatttcccgttacaacctcaagaaagtttagatggcacgctcgatttcaagcggatgactattgggactttgtccccacatctgacgaaatttgacaaaactataaaccagtactacttgaattttgctaatacttttccagagatatacgattcaagaaagatacctaatctttcatacgcactcgaagtggaaccaccagaatacagagagataccgcacgataccgagatcccgcatactttgaggttcactacaccatcagaaatatattcgttggttcaaacagcgtttccaagtactactggtttccatgcattgcttcgatatctcaaaagaagatttgacaaaaatcaattggtggaaatgtgtcgctgcttagctgagttacgaccaattttcattgccagtactatcgacctcaccgatgaagatatgatatttatggaaaagagccatcagagaactttattagagtatgagaaattcatctctcaggttggtaccccaacttgtgtatggagacgtaacggacagatcagttatgtgaatgacgagttttctctattgactggctggaatcgtctagaactactcaacaaaatgaccttcatagtcgaattgatggatggtgatacggtaatggagtacttccaaacgttcactagggttgcatatcaggggttcagaggtgctgaaactatgcgaatttgtaatctattaaccccgatcaagggaagcgttattaaatgttgttgtctatggacgctaaaaagagacgcctttggtttacctatgatgataatagggaacttcatgccaattctcaccctaccagaagacgttgggttttgaatctagaactgtcacaagtcaatagtatcggactgcttagaatagaacaaaagagcaaagctcctggcgtgtgagattgggtatttatatttatatatatatttgtattatactaactaatgcatgtaatcttgagttgcattacatcctctctcttattgtctcaatacatcttcaacaaatttcttgtagtcgatcaatccgtcagagtcgatttcgatccccttcatcaattcatcaacttcctcgtcagttaacctttcccctagaccggtcaataggtaacgaatatcacctggtgataccttgccagtattatccttgtcaaaaacttgaaaggctttgatgaaatcctctactttaccttgagtagtttgctccaacttctcttcgttatccttaactaatttttctagatcacctaaggtcaactcgtcacctgaagaagcgacaacttcctccactagcgcattggtaggattgtatccaattgctctcaaataatcaccaacttgggccttactgatggatcccttggcttgcttgtcaaatagcgtaaaaatatctttgttgattctggacatgatgattgatttcccacttcttcaatgaataatacagtactgcgtaattaaatcacgattcagtatcacttagcctagcaagaagtagatactatttaaagctccaaggtaaatataaatctattcgaatgtgtagaacaatgcatgccttcctccagtaaatatatcaaatgtaaagatactcttattgtttacgtttttcaaaatggaaaacaaattattgtttctggggcctcaaaagctctttttttggacgacctaaaactcagtcagatatcatttacccggattttaaatacccatcacgtgagtcaaatatattgttacccgcacaattcaacatcgcatttcgaaaatttccaaccttccctcgttcagtttcttttcctcagcatccaatgttcctgacatctgatgacactttttcttttgtcttcttgtcgagcgatgaaaagtgttcaagcttcttttttgatatgacctatataacaaaagcgattattaacatactcaataacagttttttatcgttcagtgtcgtatcacttttgttaactaagacataattttcattgttgtgttttcttttgttatagctcagtactatatcacagatcagtataccgtttaaactctgaacattatattgtgttccttcgttcatcagtaaaaaaaaaggtatgtgtgactactatgtccgattacaataggttcgggtttccctcagaggcgatggatatatatatattccctaaactctaacactattcaagattttagacttttacctataaaaaaagtctttggttcatattactaacaaattcttttgattattatacacagagctaatcaactgttcgttattagtgttttttccggttaaaaagaacatcttctttgccattgtctaaaaccatgtttagacttgtccaacaacagaccctaaagagtagggtcccaaatcagttcgtttctgcgtccagaaattctttaaattcccagttccgtttcaacagcgctgtcgcactagagcgtaatcctcaacaggatccaacaactgcagcaccagccaagtcgtcttcggataagagaaactctaagaagaagtatgaaaataatgaaatcattgaacgtaacgttaaaaaggtccgcaacctaagaagaaacataaaattcgataatttcaaaaactctcctaattctccagctttctctaaacttaatgccttggatgactgtttggccagaggtttggaagcatcttcctctcgtgcccccgatggtaaattcctagatcaatcttcattgttttgggattcggtcagtagtagtatgaatatctacagggagttagtcatcaccggagacttaaacaaccatcgtgcaagtagggttattcaactcatgcatgttgctttgaaggtcaatagaacccagttgactagcatgaacaagaagccagattatgattcgcaatctttccacaaggaaatgaccaattatttgtgtgaatcgcttagggaaatctctggtgatattttagctaaccgtgtctcagtcagtgaacacggtgccgctcatttgttatcctctttcaaagaattactgctttacgaagaaactttgaacatctggaaagcagctgtgaattctgagaacaaggatattgtcaaatctttcatgtttccaaacgtcgtcggtgtcgttttaccattactatatgaaaacggtaccactttcgaagaaattaagaaattgtatgaaaagtccgctagtaatacaactagatctcatggaagccctagtttagttttgggtatgattaagacctcgcttgctgccaacgaaaacgagcatgctttgtcccttttccaagagatgtgtacatcggaaggatttggtgtttcaccatatgcggttttgacgggaactcatttggccttcattggtgaatgtaaggatttgtatgtggctaagagtttcttcgaaagggctttgagtaaagacatgccctacaagatcaacttgcaggtttcttcagtgaaacagttaatccaaaatatttgggatcaaacccatgatttcaacgaagtcgttgatgtttggaccaaggctaccaaatattatggtaaagatgtttcccatggtatctcatcatcattgaactctaagttcatttcaattttcttcgaaaactatgttaccgacaaagcagctggtttacagcaccttcaagagttggtaacagcgtatgacgaaatgaaagctatcgatgaacccttcttgaacatcattttaactaaatgtaccgtttggcaagatagaaatattatcgaatctatcgaaaagtcatacgagctataccacattccaaagaccatcgtcacctaccgtattatcttgaaggctatgggaagtatcagtgttccaaatgatgtcatccgtgagaaatgggttcaattaatccaaaaagctgatcaaattggccagacgtatatcgccaatgctgattgggcagctctaagagatgctactgtaacgtacacccaagaacagtttaaaaacggcggcagctatgaaatgactacatctgattcttataatccagctttggaagccgctaatgccagtggggcatttgatgatttcaatgaacctacctccggtacaaaacatgctgatcacttgaatactcaaaccaataaagaagataatgacagaattctactttactaccaattggtaaaacgttacggtgtctattgtagagatcctaagcaatatgctcgtattaccagtggtattgcattgaatttcgaagtcgcacagccatatcttggtttggttaatacaatggatgtctcatcgatatacgttccgccattgaggaatttccacttgaatcactgatagatattcaataataatttcaaacattcattttatcaatttaactacattgactaacgatctttgtatgttgtctgtaaatatatataatatagatatacccttttccacttatgattaatctaatgaaagcttatttaaacacatattcgtctttagttgacaactcaatcgggaagctatatataagttattgtatattttgcaatacttggttctacataaaagttctcttaaaatatctaagagttagatcgtgtgcatctcttttaaggtaaaagctgaacaaaaatcaatttaagttgaatcatatctacaattattacaaacatagatataaaacgtacaggatagaacgaaaaaagagaagccattgctaagtcatactgccgatgggtctatgtggtagtaagcctagtaaaggtgtgccgttggccgctgatagttcagcaccaaaatcaaataacaaaactacatcaaaaaagagcacgggaagaccgattgatgtcacgcaaagtcaccataccttatctccaagagaagctgcaagagtggccgctgaacagcgaaatgctaaacttgaagctgccaacgccaaaagtgaattgagtcagaaactagcccatgagcgtgccaaatccaggaaaacgcatgtgatggaaattgcgcagaaatgaaacatgttggtgaatgattgaaattgaaactaaattacatacgatatttacctgattggatatccttcactgctgcttttcgtattccctctttaacctttgtattgaggagttctaatgccattgttacgtcactttcttctgcaccttccacaatcaaatacaatttaggatcatcagtgtcattctttggcccttttccttcagggtagaagctacctttactctcaaaattacatcctgtctcctgtttgatgttcgagactgtctctgttttcgttgcttcccacctcgcaagttgcggaaggtcgttaatatttatatgtgcaaaatatgttgtggaatgtccttcttcccttttacctcttgtgtattccattttggttgctccgctttcttcctctgtcacatcttcttcattttcaacgacaccatagtcagtatattcttgagactgttttgcttcgtttagctcgtctaagtgatcaagaccttttccaccaaaaccctggatcaatctgtattttccagtctttagtccactcgaaaattcgtcgttcatttccttcaatttttgatagacaaccatcggcacagagctcaactcgttctctttcatgcacttcaccaaaatataggcagatgcaagttcatcaaccataacgaaggagagcgcaacgccgttattagtcccacgaccagttcttcctacggtatgaacgtattgtgcgatggtctttgccgcattgtatataatgacaagagaaacctctggcacgtttagacctcttgagagtacctcagtacatatcaaaattccgttgtcagtttctttgaatttttgcaagttgcgaagacgttctgcagaaggtttgccagcatggataggaaaagtggtgatgccattaagtaaaagctcgtcatataaaaggtcacaaagctgctggcttccaacgaaaataattgtcttttcatcttcaccacgatgcaaggctaaccgatccgaaagccttttaagtaggaactcaaatttaacatgttcctcatcaaaaatttggactctctgctgaatgttctcattaataagtgatttagagtttatagtaatttgaataggattctttaaggttcgcgatgcaaaatgtttgagcttacttggaaatgtagcactaaagagaacacactgcttgtctggacggatgcagcccataatttggttgacttggggtccaaatccaaggtcgaaaagtctatctgcctcatccataacaacaaacgaaattcttgtaggagataacaaatggcctgaatttaatgtcataagatcaatgaatctccctggagttgcgacaatgatatcaacacctcttttcaattcattgatttgttgctttaactccgagcctcccacgcaacagatgcttgaaatgccagaccctttacaaaatttaagtgcctcttcttgtatctgaacggccaattctctggtcggtgtcaatataagaccaataggaccagtctcatcaggagctaaaggtggctgagccttgatctgtctaacaagtggtaggagaaaagcgaccgttttccctgacccagtttttgagataccaataacatctctgcctgacataatagccggtattgcctggcattgaattggtgtgagggttacaaactgtagttcgttggagataagatccatgatttcagaggacaaaccaagctgtgaccatttcgttacaggtttgggacaatctttccctgagattttaatgttatctaatgataatcgaagttcctccacatctttctctgacatcaatcccaaatcgttcggttcacgataaagacatttatttaatgttattaagtttaaaactttagagtaatcaatggcttttattttctttctacccttctttttgaataatatctctgaatcaaccggagcttcctcttgagatatcgttttctctgagctactgtcgttagcatcttcatcctctgaaatattatcaataagtcttactcggttagtattcgaatctttatcgataagcttgtggatatattcatccaatgcatcattcccatcatccaaatcatccttgctgttgtcttttgtcagaacatgagtatttgtatcgtttctacgcggcttgaataacgttgatgtggaattttcatcatcagattcactatcacttcccccaaaagcaggacgttttctcgaacactgtccccttcgtttgttcctgtccctatccgcagactttatactggtaagttttatatccttttgcttgagttcatcttgttgtttcttcttcttcttccatgcctctagtttcttcagtctctcttccttagcatctacagaaacagatgctgtaacatcattattcagtttctgttttttccacttagcaagtttctcttgcctaatccgtagcttttccgtttgatccataacgctcaccttcgtaatttaattgggtcttttttcttctttctgtgtgctatctttcaagtattaatcctgaatggttttaaggttttgttaattcaatattataggtattttgatattgaaggaaatcctttccaaatgggtattttaaactactaaatgaagatgggaaacacgctacctagttcattgcattcagttcatatgacaattgtctatattctttgttatagtgtctaaagttgactgatcttctaaagcatctattcattatttcttcatttagtcttaaataacaacttccaaagtgacatctgaagtcaaaatgtacaaggattaaaaaatgctatatgagagcagttgaaaggactcttcatgaaacattcgaatatggaaatgaagctgaagcatcctatacgttaaacagcatacttcttttgtaaatgcctgatcccatcattccctaagcgatttagccttttttagtttagctttcccgttaatatttctatatagtcgatctttagaatgtcataaaagtagtttcattccaagaaggtaacactgacttggagttcaataaggctttcgaaacaggccgcgacatatcaattgcgcaagctgtcagcatggtgttactacctgagaagccagtatggatgtcccagcaacaatatgaagagcaatatggttcgttgcttaaattgaaagaatcagagaagtgcaatcatgaggacaaacagctagcattacaacccaaagaaagtagcatcggatattcgacgcaggaaagaatagcaaagctttcagtaccagaagttcaagatgacgacaaaaatagcaaggtgcgcaacaggaaacatcagcgatttgatttagaagagaagaagaaaaagctgaggctgcagaagactatagaagaacaaataaaacatcatgatattgaaatgacagctaatagagtcgtgaatgttgaccatgttgtcaggcaacattataatgagcgtacgtttctttccaaaaagcataacagaaattattctcctatcattaaacttagaaactttaataatgctatcaagtacattctcattgacaagtttacaagagcaggagatgtagtcttggagcttgcctgtggtaaaggtggtgatttaaggaaatatggtgccgcaggaatatcacagtttattggtattgacatttccaatgcttcaattaccgaggcgcttaaacgttatcattcgatgaagaaccttgaataccaagttattctaattactggtgattgttttggtgagtcccttggggtcgcagttgaatcattcccagaatgcagatttccttgtgacatagtgtcatgtcaattcgctctacattatgcgtttgaaaccgaagagaaagctagacgaatgttgcttaacgttgtcaaatcattaaagattggaggatatttcttcggtaccatcccagattcagaatttattcgttacaagatgaacaaaatacctgaatcagtagaaaagccatcttgggggaactctatctacaaggttacgttttctaataatgaataccagaaaaacggcaatgagtttccatcgccgtttggacaaatgtacacattttggttggaagatgctatcgataacgtccctgaatacgttataccgtttgaaagtttcagaagtttggcagatgaatacggtatggaattagagctgcaaaagggattcaatgagttctttgtggaagagatccctaactgggtaaacagattctcacccaaaatgagagagggattaaaaagatctgacggaaggtatggggtggaaggtgtagaaaaagaaccagctgcatatttctacacaacatttgcattccgtaaggttagagactatcaagagtaattgtatctggcgacgattccttgatgaaagttaatagtgattcatctataagcctcttaaatactaacttgaaagatattttatatattggaactataatgctgttgtgacagtcatagattgtgagtttattagtatagttggtggtaatccatccaaccaaatatcaatattttgcacatactctagacttgccagttcatttttatgtgttcccaaaggaggcaaaggtagggtcgaaagcaacaagtttgacttagaggaaacttgtgtcatcatatcatgcaaaattagatgctgtaccctacttggtaacatattgaacgtgagttcatccgagctgccggtgagatctgcactagattgacatggtgatatcggatgcaacacaggattctgcttgatatcagtagtatgatcaatgacaggaactaatgtaggttgctgaccagtggcctcttcaatcacttttgtttttggcattgctttgctcgaaaatacaggtctgtttgatcttattgatgcgttatcaagagctttcattgagcgaacaggatgaatgctctgattttgatcgccattgctcaatagagtagagtttgattcataggctcccacggcgtaatcggactcgtattccgattcattaccagccatatccgtagcaggcatgctggaagccattgtcaatgatactcctagtctctgcaaatttgaaacatcatatttctttttcaaatggttgccattgatcttgatacttgttggctctgtagtagtgaatttcctattagaatgttgtcttgttctcgcatcgactaattctctccaccagtcgtcattcttgagggcttcatcaacacatttcttggcaattatatctgccttgacaatggtattgtacactctgaactggtccaatgataagaccagaacttcagcttcgattctaagcaccgaaagtaaagcatcgattctctttttctcatcgtaacgttctctttcattttcaacgaatactattacacggagctggtgagttctatgccaatcgggaacggtagttaatattgcccccaattgtaatataagggtatacgtgtcgaagttagtagttgtaacttctcctgaagaattctcattaacaattgttgcggacatttggattggatagaggtctatgtatcctttagtatcccttgtttcgttcttttgaggaagctgcaagtttttgaatccataagcaaccgcaatgttactacgcattaatgagagatcttcaataacctgaacccattgttgaagtttgactttctcctcatttttacactcatctgtaggtagggactcaaattcaggatgacttggcatttctatcgaaatagagtctttgtactttgtcactctgaagttcatatcttcccttaaagggctagaagcgccgacaccatgcggtcttttcttctgtaaataattgtttaaatcaaaaaatccaagcacagtgatattgggcttcatgcctcccaaaccggaacccatgaaaacgtttctgatgccccaaggtagagtaggtcccatcccaatttgaacaaaggctttaataccggccatatccctgatatttacccaggctctcatttgcttattgagttcctgatactcagattggaaatttgacgctactgtaacatggcctaggatatacaagccaccttttttcaaatgattacagaacttgatcaggttccaacttgtccttggattgtcaaccataagcaaaacttgaggtctccaatattttacgttgtcttgtcttaatctcaatagatattttctcacttgatggtagattaatgattgagaaacatcaccccagggttttggtggacaaaaatagtggataatgacaaataatagacatagagaagatataacagcagaggctgaaacattgtccacaacgtacatggctatgatacagaacatagcgcccaggaatgctgtgtatctattgaaccatttgaaagatggtctgaagttcggagctgatgaaatttccaacaagaaacatgccatattcatgataatgaacgtcattaagaaagtcattgtgatgaatgtagcaattttgttcacatccgaaaacaagcacatctgagttagaaaccatgagaaaagtaagcaaagtactggatttctgccaaatattgagataccaggcaaaatgttatcctttgagattgcttccaacacataagcagcacctaccatacccactatgacggagaatagagaagtggaaagttcaccgaccagaatgatgctttggaaaccggacacggtctgtataatttgcacgtctttatgcaaggatttttttgggactgaacagcctaaggatataatgacaagcgaataacacacgaaggttaacagaaggccccaaagggttcccttaggtatggatttggaaggcttacgcaattcactggacataccggcgccagcaaatattcctgccgtagctggaaaaaaaatcccgaatagatcattgaacgtttcgtaacccttcaacaccgagcctgctgcaccctttgtaaacttcggatatagattttgtttgagtatctgtaaagacggtcctgtgtacacgattccattaagttcgaaaggcttcacaaataaaacagagataggaatcgagattgtagaagccaatagcaaccagaatagaacgttaccagcacgcgagacagtctgtgaaccaatcatagccaccgccagacataacagaagcaaaaccgtagagtatccaaattggtaccaatgcccttctggaagtacttgagttagcacaccttccgagataccaaaattgtataacaacggttccacgataccaactatgttcataccactattcaaaatttggccaatgaaaaagataagaccaatagaacctccaaattcaggacctaggcatcgtgaaatcatgtaatatgcaccaccacctctcactgtaccgttggtcgatatagctgaaatgctcaatgtggttgatacatcaatgataaaagataagattaacaatagaaatgttcccaaaatacccatctgtcctattatgaaaccaaatctcaagaacattaaaattgagagcacatttaacgtagtgggtataaatactccatcgaatgttcccaatttatttctatggggattctctagatcatattttgaagattgttcttgttgtaacggtgtgtcttgatatttgaaatacgttaaactcgaccttctcttaagcaacggtgagcgctctgattgtgacggaaggtgcgaacccggtagttcatagaacttagacatcagtgtggtgacagtgcactactgtcgttacctttgccattgaaaacactgctaatctgaatatttttatcgcttcgttatttatctttgcttgatttgacgaattcctttaagggtctatcatttttgaaagatttttgaaatttcaccatagagcaagaagagatttgaaatgcagagagattgatggatatggttcgatcatgtttgaagcattcaggcatgctcagaactaccatctaacaggtgaaaatcaacgaaaacgatgactacaagataccagagggttttggagataaatgccaaagagaaaatatctctggcgatcgttaagttccctccttttaagctacgtgcggcgatggttgagaaagatccggtgatatggctccatttgctggaagtttatgtgcaacatatgagttatttattacatggtgacaacttagactttctcagtgatgagaccattgatcatctatgcattttcgttaaggcttatgtgcatgaaatgagtgaagaagaaggaaaacttctttctttgggaattaatgcagatgttttgaagcaattagagcttttaagagcttacgttttacagttgattaaaagctgtgggctactatacttgaagttgaatacagagtctctatgggacataacacggtcctacgtcgagggaaatgcaaccactgtcagatcgttgatcgaaggatctttaagaccgaccattaatactcagaaagcacaattggataggacgtaccagatacagcaacatataagatatttgatagaagccaataaatttagtagagtggatttaaagtctctggaattgcttttagctgctgatgataaggcgaagagttcatttacagataattttgtgtctgccaagtgggttgatacattagagtcaatgtatggcaaggaaccagggagttatttatcagattggggaaagaaacttggaatattaagctttttgtcctgcagcgtcacacatttggctgatttgttaaagcaaatgagcataacgaacttacgaacactttcaatgtatccacttttagggtcacttctaattgatgccaggtttcaggaaaagttgccacatattaaaactaaaatcccctttttggatatacaagaggaaccgaaggcagctccccatttaagcggtctgctaatgcctagtgtcaatgttgaacaaatagacacaatcaaggaactatttccggaccttacttctaaccagataacaaaattattgcagaggtatgataataacacggaagttataatcaataacttgtttgaaaatccatctgtgatatcttcactcgaagatgggccactgcaggatgacgaaatacagaatacgaccgaaaacctgatggaggaacataagccgaaggagaatttattgccagccatcactccgaaggacaaaattgaaaagaaaaacatgttattccctacaaacgacgtacctgatgctgtcagaaacaaaacattatcaagagctttatcccttctatatgatgccacagaagatgaaagggatgacacctacgacgatgcagaagttaagcaagcttctgcagatcgtgtaagcgtcgatacttctgacacagcaaaggtatcaaccataacaccaggcacatctaagtacgataaaattgaaggatatctatgggaattattgaaaagggataaaaatcttttctcccgtcagcaacggggctcgaaacagcggaaagaaatgaagaaagagactaactggtctgacgaacaaattgaaggttggtcaagaatgattgagaagagtccaaagagggcacaactgctagaagaaaagtatattttcaaagggaacgttcggcaaggcaagaagacgtttacaaaagcacgagaggataaagaaggttttgatcatcatgtagttgacagcaccgtaaattcacctaacactaacagtaataatgattctggcagagagaaaacacctactaccaaagaacctcttaccaaagaacaacaaaagagaaaaaatgctcgtaacgagaaactaaaatcaagtcgtgctaatcataatagaaaagcgggacacgataaaaagttagctaaaagtggtgttttatgatgaacattagaccagtatagatacatttacgaaaattgaagtcgattatcctgtatcttcctatttatctgtagatattatgaaatgcatttactttaaatatcattcttcgaaactttccttttcttggattctaatttattccaaagatcctcattttcagcatcttcatcagcttcgacgatgcttcttttggcttccttcttcttcttcattttcaattgcttttcagttaaaggtaattccaagtcattgtcttctaagagtataatatcagaaaccttaccgcctgtgaatatctttgccaggagcttataatcggctaaatcaaagatacgaacatacctgtccaaaccaccttgaagtaagtatttatcggtaacagcaatgcaagatgcaaaaccagtaatgtcgcccttggcaatctttctcaacaagcgtcccttgccgttgaattggtacacatcttttctggagtctgctgctaagaattcaagctcgtcaaagttagaactttgaaagttacccagtggggatgtgtcgcctataattttgcaagaattcaattgctcacctttgggtagaagagtaatagatttcacaggtctacaatcttcagcgttggtggaatactttcttaattgagcatatttcgtaattgtaatgaaattataaaccccgttcttttctgattctaagaatctcaaagcaacatcccatgcaggaactcttaacccaatgttgtcaaagggaacatttttagcagcccatatatcagaaatttctttgaaatcggatgataactcgatcaacctaactagattttcctctccaccgtatgccataacgaacttatcagatttatctaaatcataaagtgtaacaaactctacaggcgcctttattttatgagaagctatcttggagatcttagttgaatgcaaatcaacttcgatgatggtcacatttccagatttcgttgctgccaagaagatggggtttttagccgatttcttaatcaaatatagttccacaaattgatcctcgatcttacttttcttctttgatttcgaactaagtgtatccaacactgactggtcaaaaagtcccgatattagatcttgaagttcaaattctgtcacatcatatttcggctcatttgtttcatcaacatccttagaaaccctcttacttgacacaagttctaaactaccactatgtcttgctaagagtaacagagaatcagaaacatgatatatcttatcaattctgttggacaaaccttggtttaaatgaatgtcaatatggaaaggctgtagtgcagtcttaattgaggtgtttgtgcctctgttgaaaataatttctttcaatgagccactatcatcactcgccaataaaactctcattgttagttcacgtcctggtatttctagacggagtctcaacggcaagtactcttatatatatcgtacctcatcgccagtgttcttatgccaatgatgcgatgagctctaaaatttttcaaaagaaactatccgggaatacaaaatcacgtgactgatatcaaaaggtaaagatggcaggatgacggttaaacccatgacaacctttcgctctcaatgtgaaccaggcttatggattatttttaggtacatcaggatcgtgtaaattccagcactggtcaatgatgaaaatatacaccgtttgttaaaggtattagtctgtataggggcattcgtgcaagtgaagaaatattaagaagttgaaaatcgttcattattactcagataatctatatgtgcatcccactttaataagggtaaaatgattgtgcattcttctgaatctacgttaattaatcgaacagttcattagtcgagagtctcctaatgtctgatatcgctgctcaattcaaattggtcaaaggatctatttattctcactgtttcaatcaggacagaagccttttggcaatcacctatgatactgattgttacgtttacaaagtctctgctgcaaagcaacctcaattggtagcagtactaccagatcacgacaagactgttactgctgttgatatttctgttcacggtcgtattgtaacttgttcacaagatcgtaatgccattgtgtgggagcccttatctaatggtacttataagccaactttagtcttattgagaattaacagggccgcaacctgtgtttcatgggcttcatccggttacaagtttgcagtcggttctagtgctagaatcattgctgtgtgctactacgagcaggagaatgattggtgggtttccaagcacatcaaaaaacctatcaagtccactatcaatgccttgtcatggcactcaaattgtgtccttttggcatgtggtggtactgatggttacgctcgtgtgttttccggtttcattaagggattggataccaaggaacaagttgctggctctccatggggtgagaaattcccatttggttctttggttagagaatggtaccagggtgcctggatccacgatatcaaatggagatcttccatcgataaggtcgcatttgtcacccacgatggttccttgaatatcactgattacactgacgatattaagagtgtagacaacccagaaggtcttccattcatcaccttatgttggatcaatgatcatgaaattttagcagctggtttctcaaatcatcctgttttgtacagcgaaggttcaaggggttgggaagtgtccaagattttggatagcccagttaagagtgctggcaaattggtagcatcaactggggatgatgaagaagaaggtgccttcggtatgtccgcattgagaaagttcaaggaattggatttgaagggtaaagttagccagcaagaagagaaatctacccatgtgaactcaattacagaattggctgcttacaaggaatctaacaacaacgtcactcaagtttcttctgttggtttggatggtaaacttgttatatacaagttgtagatatggacggtaaacgattcatctcttcatcaaatagttgatcagatcacccctataactcttacgttcagagtgagaatacaataaaaaagagtggccttagaaatgaaatatgtatatctatgttcatatatattaaaatgtaatgttacaactctgattatgattacaataatcagtccgattccgctcatagatctgaaggtttttgttggtgatccatccgtcgctgtatcacgagtgaatatacgctacctttgagaagcgtacttacaagagatattttcacttcaatttctcgcatctcttgtaaaattgcttccggttttgagtcctcatgggtgttgtttagatctgaaagtgtttcgctcaattcccttaaggactccgctaggaagcgatatttatcgagcacacttcgctgcaatggtgtcagttccgaagacatattcaaaacacaaatagtatgtttctttgtaatttgtacgtaagcccaaaccagtaatggttacctttgttgccttaccttacatattcaattggaactctatccggtaaacttatgataacgttatttcatttttggtattttccaatattgacgaaaaacataaacgatcgaatcctgaaagaataacaactccatccttcaaagtaaggaatacaaagccaacgatttgaatacaacaccagcgctcctctattgcacgaacatccactcgaaaactctagtttcaggtgtatacactgaaacagcgataaattttattcgagtaaacggtattcttttctttattcatttgtgttcaatttcaataatgtcacagcagtcctctcagcaacaatcttatacaatttggtccccgcatgatacggtgaaggatgtggcagattcactcggaatctcaaatacaaatgatgacgtgttgaggtcattggcgatggatgtcgagtaccgtattttggaaatcgtggaacaagcggtgaaatttaagagacacagtaagcgatctactttgactacaagcgatgttgcgaaagctttacgtgtccttaacgtcgagccattgtatggattcgaggaaggatcagcgaaaaatgagcccgttaagttcaataagttggagggcgctaatgggcagacgctttattacctagatgatgaggagatcgattttgaaaaattgatcaatactccattaccagaagttccaagattaccaacgttcacggcgcattggctagcggtagaaggaattcaacctgccattccacaaaatccaaatatcaatgaactaaggctgagtcaagttccgttgcaaagaggagcaatagtctcaccattaaacgaaacttctgttcaaacctctttacaaacaaatgtcaatgaagaaagacaggccaccgcaaatggacctatctcgacacaagtgaaaccaggtgcagcaagtgaagctaagccattggtcaaacacgttttgtctaaagaattacagatatatttcgaaaaagttgctagtgcacttacatcgaaggaagaagatatcaattcacaacggatgagagcagcagctttaacttcgttgaagtctgacacaggactacatcagcttgttccatatttcatacagtttatcgcagagcagattactcaccatttagaggatttggagttgttaactacaatgttggaaatgatatattcgttattgagtaatcaatcagtatttttggatccttacattcattctctaatgccttctatcttaacactactattagcgaagagacttggtggtaatggctcgaaaaactcatctgacgacaagattgttgaccagcaaaataaaaaagagtttttagagaagactaatgctgtccgtgattttgctagctctttactcgatcacgtcttgaaaaagttcccaaaggttcacaaatcgttgaaacctcgtgttactagaactttacttaagacattcttggatatcaatagatcattcggtacttactatggttgtgtacgtggtgtttctgtcctcggtaacgaaacaataagattctttttaggcaatttacaaaactggtcgaaactagttttcgaggaatatgacagaagccaatcggaagacagcaagagcggaaagaacctaactgacttggagataaaattattgtcaacagtgatagtgtccactttagagaacttgaaatctgatcttccatcttcatacaacccttctggtgattttagtgaggaggacaaaactcgtttgagagaaagatgcggaattactgtcggcaacgtaatactggaaagagacgatgcaaagactctatacgatgctatattttttggtgagctttagacatcaaatatgtaaatattgtaacgaatatacgtattaactacggcgcaaataatctcctacggacgtgcctggttttaacctttactggcgatgccctaactggtgtttctgaaacaactgaaggggaagccaccaacactggggtgtccttcttttcctctataggtttgatcggagttgctgtaacatgtatatcctgctgtttatcatcaaatccggtttctgagatatagctagcaagtttacgtttaccaactcgttggaaagagttattatgagattgagagatattgatagcttttccgtttaccaaaacagttctaacagtgctgaactcctccaatatttgttgtctttgcttgacaatatcgtctaaagaaagatcttgcacagacatttgtcttttttgaaggcgattcagtttcaaatccgacgacgaccttgacgccattttgggtttcttctttgttgtttcctcctccaaaaactctacaaggtttgagttcgttctagttcttaataatggaggcatttgtggcgaagagcgctttccatcgctgactgaagatattgatccagctcttgatctgttagaattagtttgctgcgcatttgtcatgggttttttttccatagtaggtcccttgattttattcgttatgaaagtgacaacaaaaggcagtttcttataccaatatggaacaacgacgtaactgagaaaacctttggaagatatttctttatttttattgactattccttgtttgtattcatgaattaatttgtttattggcggctgttcagaatgcaatgatatttcggtagatatcaaggcctcggctattcctaacttatccaaaaggatatctaaattttgacaataatcgattactttaagttgttttacggacttgctagactttcctttatttcgtcttcttgaaaatcgtgtcatggttgtcatcatattaaaagacccttcattaagtttgtttgcgtggtttgtttcgtattgtttaatcgtagaatccaactttccttctgttagtaattccaaaagaatcataatctgcagttttatatccctaaccttcagtatgtttgagatgtctgatatgacatcgtttaagttctgcatcctttcaatatccaccccaagagtatcacgtatgcttctaactcggaagtctttgcattcatcagggatgctctcatattttagcagaccgcagtgctctaggtgatgtctttgttcaaaagttgattgatctacgagagaagacttcagtacggtttgatacgctttcccatgccgtttacatagaactttgagtcgtgaaagtttcgatttaacaaaatgtgccagcggatcgttgagggagtataacatttcataatatttctgttgaagatatgaactcggatccagttcttgacggtgaataaatgatccactaccatgttcatcaatcaccatctctttaccataactaaagcccggaggtttcataaccagaggtaattgttctggcatgtcaccatcaggaattttctgtctgtcttctttccaatacggaagtatgtcttcgatgctcagatcgcaccattcgtcaagagtctttacgtcataacgtgtagagacctgctctttataatttggtttatcgtgaccgatactctcctgattgggtacctttactaatccccatcgcagccaactgtcttgaaagtaatgttctagtatgataaattgatctccattccgtagtaaatgttttaacacaacatcggtcgcttttatatttgcttgcacttgttgaaattctgaagatttgaggtctactaaagtaaccgaggtctcatcaatctcaaaaccagccggcagtttgagaaatgaacaaattaatacccactgccttgcggaagtatccatgataccaatgcaatgtggataacgcttattcacagcttttatttgttttgtttcttatgtatttcttgaagacttcttccaagttttggacaatgcgattttaacatcgagaaatctcattctgctaattgttgaatattcatgagaagtacgaagcaaagataaaaaaaaaaagtatctacgacaacatcacatagtggtattagaacgctttatcacatttgaagtaatttggcgttaattttatggaatgttttatagttgattccgaaagagagtagtttatcctcgtttattatatttaacatttacaaacgttgctaataatcgaatctgcagttgtaaaacgcctataaacaaacacgttcaataatacaaagtgtaccagtcactcgtcgttcattccaatggtgatgttttcttgtctttttcttttatccatatcaattctgttattgatcatcattatggcagtttgggttgccaaaggagttccgatcaggacaagttttctttcatcaagaccttccacaggatcattaattttaatcatgcatcctgttgattgtttgatctgctgaatatttttaccaccttttcctatgacgttaccaacaaatttgttatcgatgaacacctcttgtggtaatactaagtggggagagataggagattgttgtaactgagagattattttgacatgcttacacgagtcaaccatatcagtatacggctgaagagactgctgtggccctattgggtatttggaaacgggtggtttcgttctgcgattcattgtctttttgtccataggatgatactgatgatgctcctggtggggtgcgaccatgggtgttatatcttgaggattagtcggagcaccacctgaataaatcatgtacatctggtaattgttgactagtacagaatgcatcgggccaggatgataaaataccgattttttgttctttagtttactctcattttccaatattgtttgaccaatgtagtaagtagcaatatgaatcgcgtctgcaactccggtaagagacaaaattctatcattggacatgggcagttgttgtggacttgccataagcctagcagcactcagatcctcgatttcgtggagcctcgaaccttgtctaccgattatgcaccccataaaatggtgaggaattagtaaattcaccactaatggcagagatctctcatttgaatcgtcatcactctcattattaatagccctgacaattttcccaaacgctctggctacttcttcacactttcctcgaacaaatattaccctttccatgacaccattaatgttgtctgacacattaattctcgtgtttgtctcagattttatcctattaacacgttctccttttcctccaaccacttttgaagcctgcttcatcaaacataacatacgcaaattaatataattaggaacttgtccagagtccttctcagtgagatgcgtgccatctccgttcaattccgaattttggggctcagcctcgttgtcttcaagagcaactctttttattccagcttctagtgtttcatggtcgggtttccgttttaaagagttaggtgagcttacgggctccaagctcaaaacttcttcatccgccataatattatcaatcaattggcaaatactagctccccttgtcgttcaatctgcgtttgttgagttgtgctcgaggccactgtttacagtaaggttcgaagactagacaagtttatcaaaattcaatttcgcttttatttgttgaaattgaaaaacagacatttgactgataaccttgagacaccttacctcatcgatagagaaacaaaggaggaatagcgtcgagtgaaggtttatatccttagacaataattacttataagtgtggccgacatctattaaacataaacagacatgtctgacaccaagggctctgacctgaacgaggattctgcattagagtttgatgaggaaagttatcatgaatctgaggatgaggacttcgatcccagtaaagagcagaacaaaaggaaaacaactaatgacaataaaaaaacagacgtcaatgccaatataagtgacagtgatcaggacgaagatgaagatgaggagtatgacgaggaagctcaagaagaagagaagaaatatagcagtattgttagcgaatccggcggcctcatcaaaactagaagggcaagattacaagaagagcacgatgctttaaagaataaatacgaacaaatagatattgcagaaacttccggaaaatctaatgatttatggcgtcagttgaaggaacgagcacttagtagatcacaatttaacggatctgtgatggatcaagatgccggttcaataacagattctatgcaagaacagaagatattgatcgaacgtacttataaatttgcaggcgaagtaattaaagagaaaaaatgggttcttcgtcacagcgcagagggtcaagaatatctcaatagcatcaaattcaaaaccggtactctcgataaaaatacggtaccgcctgatactgttaaaaatactcaagctcaacaaactgaagggaaacaaaatagagttaacgaggcaggacgtcttttaaagaggcatctgaaaaggcctcctattcttgagcaaataatagccggaaatctaaagcctaaactcacaacattagagaaatcccaactcgattgggccagttacgtggacaaagaaggtattcacgaggagttaaaccttcacaacaaggacggtttcttagcaaaacaagatttcttgaatagagtggagtcttccaaggatcaaaaatacagagaacttcgaaaattgcagttgcaaacggagcaacagaaacagtaaactcgtaataggaagtaacgttaaattaatgaattataaaatagttgaacaaaaagagaacacttaaatggtatatatatctttttaatcaaaaatgcggtactccgataccggtaaagaacatgttaactatgctgaatatcccctcacccaacaccaatcctgaactaaacacaatcattttcgtctttgcatccgggtttcctctgttggtacgtaaccagatgtgagccaacatgcccccagcaaaacgttctatggtgaaacttggagagttgtaaatcccaacacctaccgcaacgccagatggaatccacaaaacccatttataacctctgtcacgaagacagtttttaattaaagataaaacggcaaatatcgatcccagtactaaagagcactccagtgctttatcaggcaagcttttaccagtaactaacctggcacaatcaatccacacaacagcagttggtattctgaattgttgattgggaatgtcgtaaattttattgtacaacttgtaaactatactggacaaaacaatggaccaagctgcgcctatcgattgtgcaatgaattgtgcctttggtgatgctcccaacaaatgcccggttttcaaatcttgcatcaaatcccctgcctgttgagccccagcttctgcaacgccacccgccacaagattcaatagcacgctaccattctggctattcggaatgattaatgcgaacaacaattgtgatagtttaccaataccacttacaggatttaaatcggtttcccctaatgcacgaaccgctaaaatagaaagaaaagaagctataaccagggccgaaacgatggagtacaatggaatgatatcaattccaaacaaatatatcattactgtgacacatagtatgaaagaaattgccaatccacttagcactgtagtataggctactaaatgtttggaatcaacttcatgatcaatctctgtactgactagtttaactgtattttcatgtctaccccgagaatcgttcaacactcgttcttcttcgagtaacatcgattggatagaatcatccaaaacgctattgaacatttccattttgtcatctaagaggatgaacttcacaattgatcgtatcgtgaaaacgatgaagcccacaacactatcaaccaccataattgaaagcgatgtccagataatccatccttgaaccccattttcccaatcgtgaacgttggcttcaggatctacccagcgattgtaccttgctagaggtgccaaaattccccaccctaatatgcatccaaaaagcatatatgaaaccgtgggcaaccccatgataataccttgaccaacgtatgcaggcgacggctctatattccatagataaacgtccgaagcataatttccaaacatcgggattgacttcactgccggtacgaaataagaagtgacggtatataatgcagaggcactgaatgtcttcatcaacacgctaacattttctctataagtgggcacacctttagatgtagatggaaccaaatggttaacattagtctcattagaaccattagaatcagcagatgtgtatgaattgggggcgttagaattcccatttcgcagcagcggtgagatttcacagttagtttcatcatcactgcatagaacttcaccatactcccttaatcttcgttccttcatctcaaccaattcctgtgtggtcacttcttgcaaaatctcagacccgttcaacactgaaattaaagttgccgttgcactgccactgggaaacggtaacttttccctcacaataacttgcttcctaatcggaactgcaaagaatatgccaaaaaatgctaacgctgccgaccacattagcaattcgttaaaagagaacgcttctcccatatgtcttgtaccaccactttcctcatcagttagaaacttttcaatcgctggaaccactccaacaaatccatacgctaacggtccagttccaactgcgactgcgatactttgcacataaacgttctcaacatcgctaaactgcgaatcattggggaaaaccaagggccacacttgcttgaaaacagcacaagctagaagagcactgggcaacgacatcatagaaacccaccctgtctgtaatccaaactgaaagttagacactagtacaagagaacctattatcaacccgattattgtggatcttagtgtcacttgcttcaaccagggtttacgatcccattccgttatgctcccacccctacttccaccagtctgactctccatgtataattaggtactcaattgcttgttaaaccgaagatcactaccactgctcacaacatacagatccactgttctcacaacgttactacatgcaagagcttcgggattgcaacttcacattatttttgcagcattcatttattacccaggattgcatccttttaaatgttgcagtttttcatgttgatgaggaatataaaggcaaaaaagtcgtagataaggcataattagtcagacagacgaagctggagataagtatgctatcgtaggatatttccgtccccaaaactgctccacttttaatggtcagtcttattttttcctatgtgttggtttatcacactatacagtgattgtataatattcttccaagaacgttcctctatatgcgtcgtatgtatgtatataagaatgtctgtcattattagtcgttactagtacattaaattcgtggagtttcctgcatatagattcaggcacatacggaaaaacacacggaaggtgcaaagactcgctaaccttaaagcttcttttttttccagttaccaaatgaatcatatcattatgattctgcgaatagtatgtattttaggatatcgcttagagtgagaacaccagttaggaatccgttcgaatcgacgacgaaaaatctatgtacacgagattttctcactgtatcaagaatggaggagagtttatcgttttcagtacatgtgaagacaccttcgaaatcatcacttcttctcatcagagcttccccaacggatagggaaagatcgttgtatatgcctcccttaatgagacctaggacatcaacggcttcgtagacgttgaccaatttaccttgctcatcgacaattggaacactggaaacgcctccagccagagttaaaagttgaatgacatctattactggcgtgctcatttgacaactcatgatgttatttgtcgatataatgtccaactcacgtagaggcctctttagatagcggatttccttgcagttcaatgccacaaattttaggatacggtattgtgttaacacactcacgacaatttctctttgagtctcttcatcttgatcaatcaaagggatcctcctggaccgggattctatcatcttcacacatgcttcatacaacggtctgaatggatgaattgatcttgtatcgtaaggctggatgccaatggccctttcaatatctttgagtccgttcaattgtagtttatccaccagttcaaacttatccgggttgtggaaataatattgaatcacattgatgaagtctgaacttgtcaataaacctgcaaatttggaagtttgagcatcccacaagggagcagaaacaacattgttttgtaacaggatatttaacgattttttcactagtaaagaagtgtccaacacaatcaatctatatgaaactggtaacacatcataagatgtcttagactgaaggaaaacacgtatagactggacagcaagtttctgttccagctcaatggtctgctgatctttcggttgaagtttatcactgcttgcaggcatctgtgtataaattgcttgtgtattcttgaataacagcttctcaaaacaatggaataggtacgtaagctgataaaatgaaagaagtaaagtttctaacaacacctcagtactttgaaaccaacacaatcagacagttatagatcagatttggccctccaactcataacaaactcgttgattctaatgctctaaggccattcatatcacagagccttacgtatcataaatatttcaatccaattatggggggagtaccataaatcacgttttacgaaacaagcaatggaaagtgaaaaaaattttagtataaaaggaacaaagtctgagattcattcacttctcactatgtattataagttcgcgaatcttttttgagttttgcttaaaaagccaaatctctttgcctattggcttagatcaagtgtagtatctgttcttttcagtgtaacaactgaaatgtcctcatagaggatattactgttacagactcagtttttggccaacattacaactaaaaaactaacgtttccgggcttgaagagggtttccagttgcttcgcgcgggagatagaatgaggattggagtggcacggaggatcttggcggggagagggtagacattaacgatagtcttcggattgtcgagcgtgttttcccctcatgtttccttccttttcccttccgaatcatttcactgttctcttctatttcttctggttaacctaggagtgtcgttaccattgcacttttgctgaggcttgaggaatcgtattccttccgcttcatgctccctcggtttctgacgcactttttctctgaaagcctggttttttctccttttattccttctaagtggatttgctcacatttcctggaaataagcttttagatgagttcatctgatctgcatagaaggacaagtgccatattatttgctgtcagagagattactttctcattactataattattattaaagaaagagtttatatcgaatgcattttttcctggaaaactacctaataatgtatgtgcctttggatggtgatctttgaggttcgtcattttcatgcgatttagtgtctaatttgtctgtgtacctatgagttctatcatccaagtatttccttttgcgtctttcttcgaagactcgatagaacttgagattctcatctcctccaacagatgctatagtggtgccatcaggggataattgcgatgaaacaatacgtgaatcatgcgcttgttgtatttccgcaactttgaattttgtctcgtaattgtatatggttatgcagttatttggtgtaccacctgtggctacaatttctgtatccatacaacccgaatgtttggagtaactttggccccagtgcaacgagctcacttgtgagcctgtatctatagttccgagcctattaccagtagttgtattccagaaatgtatatgcttgtctaatgaaccaccgccggtggctaatagattggtaatttccggatgccaactaatagccttgactgcggctttgtgatttcttttagtccatattggatcattattttgccttgtatcccatatcataactgtattatcattggcaccactggccaattgtataccgtcttccctaaagcttaacccacatacttcaccttgatgtctttcccaagtttgcactacatggtttttgattcgcacatcattgatttggatttcaccacttttgctaccagtaacacaaagggtatccaaccatgactgagaaccaatgcgtacaccaaggcctgacctcattgtcctcacatgtgtcatagtttcggcatcccatatttcgacgttaccgtcgtttttgccaatggaaatatgacagctatcatctgaccatgttaaactggtacatgtggctttcaactccaccaatagattaacatctccagactctccatcccagaggtaaatgctgttatctaatgcaattgccaagacgtttttcttggaccagcttagtaagttaagataaaaatcatcttgaaaacccggtgcatcaagaatcctttctggattggtgttgattttcctaagcttggctagggcgtttgtctttgaatcaaatttgtaagtttgcctactgccaattgagaaaattgggcgatccaaggaaggttgtggtgggagaggcatgtactgtaaaatcctttggttcatatccaacccacatgcatttgcaactttttgtttgaacattttctttgtctgcgcgctcaaatgtttaaagggtgaagcgtttggtggtggttttatttcttcaggatcttcttccagatcaatgcacttggtgttttgtgaatgatgcacttgcggtatgaaacgatcagggtttgtttcttggtcaattgaattataccctgtcccgcttaatggttcgtgaacaggcgattcttctctaaaaaatgaagaactcctccgcagtaaaggtggaattccatttttagcaatcagcttaggcctattgatagtatttgtcacgtttccaagcgtcgattttccctttctctttgtaatcttattctcattaggaataacatgtaactttgttggtgaagttaatgaaagcattgattgcttcgcagaaagctggctattcttgtccatttccccatacgattagggcacttctctcttttcgaattcttacctaacaacaataatatacttcgtctgagtttagtttgaaggatgtctaacaacgtagttgcttgttcaagtaaatccactgaatgccaattaagaagcataaaatactaatcaaatatatatggaaaggtattgaatcgaatatgacacttcctctgcccctaaaacgaatggatataggaatagtggtttgcttgaaatgtgggaactctcttttgaggttatgttctggttcaattagtgctttgtgacaatttttcgtcaacatatgttatacactgatttattgtttacattttgcctaatttggatacataagtgtcaatcgaaaagggcataaacatttgaaattaatgtcaaaagtaataacacccagtaagtgtgagtggactatgaggttgttaacagacttttatcatagatctggtctttgacaggttatattaagcaatggtatttaatacttgaattatgaatttcaaaggaaaatacaattttctttatttatatctaaaggatacagattatctagtattctgaaactcttgaaaactttgtcaacgacaaagcataattgtccttcaggatattgctgaagtagatattgaagtctactatatttaccagcctctacatggaatccagacatcagtaattatgccttcatcattcaccacaaaatagtgaccgaaacatgccatggtgatacatacgtgttgcattagtatttcaacttttgtaccgtgaggtatcattttgcaatcgtcatctagcggctgcaaaataccatgttcttgggagagtctttgtaaaaaccactgtccatactctgggtgttcaggcaacaaaccatagcccgggaatttgtgggaaacttcttttgtcattgataaaacaccagtgttcgttaacatttccccaattgaattgcctctctttgggtattgcgatatgacagtacctaaaacaaaagaggaaatattatgctctgtaatcgcacctgtagaaacctgttgcaagtcagaaatcattaagttacctgcatgcaattctagagtcccatgtaagttattaatgtattgggagagttcagaagtgttcgtagcatattggaaagaccttgcggtgggtgaagcaccaacactcaatatcaacttagaaactggatattcctcgtcaattgcaagaagtgtattgcaagcattattgacatggtcaatttcttctctcaacacagattcattagcctctgcagacgatttagaatatgaatgtcctgcatgagcgtaaaatccaaataattcaatggaatcagttgccttcagtaatctttctaaaagagcaattaagtcctcttctaggaaaaccccagctctgtgggttccacaatctatcttaacgaaaacagaccacttgaaatcgggatcacccaattccttagcgaacttttccaggaagtcaatatgttgaatgttatcaacaaagattctaaagtgatcaactttcttggagatttcgtataactgaggaataatgtcaggaacacacgcaggtaatccataagccatgtctgtaacgatcttagtcttctttttttcatggtaatccaataccaagtacgcctctctaagggtactcaccactatggaaccatatttggggccatcatattcaggaaggttatgacccaattgtttcaatgtgccctcgattgtcttatgagtcttgatatgagcacgatacttaacaggtctctccaaaaggctgttgatactatcaatggattgaagtaaagtgcttatattggaatcaattacaggttctttcataattaacgctggagttggtaactccttataatgcctccctttgtaggcatttcggatggattcctgtacacctgcaggatcgagtggatatctctcagatggactcaattgcgtagccattggcggtctctatcactggttggagcctttgatagattggacactctttgatagattggacactcatgcaaagaaatgtgacaggtgcaagatggtttctcattatatatacattaggtgcctggcttggcagccaaaaaaaattgagatgttttatctctcagatttctgaggggtagatatgagattacaaaattctggccacattaaatccaccttacgcttccttctcagccgcagttcattgtgtaactttctgctgcctgacaatacgaatacgaatgcgaagatgtgttatcaagcaagtgacaggaaacaatgatacatcctcttggctatcgaaagtcgacactggcttgcagtacataaacattcgccggtttttataagattattcttcgaacgataaaacgatgtgatgatcttaaaacgaaaatgacgtattctgtatcatttcccctcctctcgagcaagagaatatcacggaatggctaattcttatatattaggttgttggtgccgcagtaccatgtgcgatagcggatattccaaaatacccactagaaccaaaacccaagaagggtccagacgtttcttggtgcctttcgactttttgtttttgttttgccgttctggtctaggtacgaatgaaggaacatgaaaaacgactagtctcgtagtgaatcacgatgttcagaaaatcacataacggaatgatggtataaaatcgaagaacccgttagtacactcatggtggggaaaaccattaaacgaatagatcagcacggtaaatcctcgcattctttatctgatattaaatgtcttctactggtatgagcgtatgtcatgataagaatcttaaacggaaaacacccacataaacgaacagtgggattggaatcattgtcgcaataagaaatcaacatgaaacgcatccatcgcctaaaatagatagcatataatattcaagactaacagaaatagtatacgagttgcagacctacattccgaagatgaaaattttctagttgcggcttaaacggctatatccttttttttttttttttttttttgtgcgcttctcgaatcctttagtctttcggagcaacgatgattacacagcaggaagtaaaaaaagaaagagcctagaaatatgttgaatgtcatgacaaattacagacattactacggcactgcgcattgatgtgtccgagccattgtcattccaaatggacaaaaaaaaaaagactattgtctaatttttttttatgcgagattgtccatcttaaaagtttaaaaagaaaatcaacccaggtctcgagagcgaaacccaaacaccgagaattggaatgcaccaagaaataacaaacaaaaatgcacatatactgcccgatgtcaatttacttttttctctcactctttataacgaatacacatcatcataaatatatacggctgcctacatagcaatcatcctccatggcgtggtgattgctactgacggtaaagctatatttcctactacgaggaaaaccaaaaacaaaaagctgaaacaaaaaaaaagagacatatataaaacatatcgtagcaactgtaatactcacgagttcttgctttctgcgtgcgtttccgctttacctgccctgttctggctctagtgcattatttctacagtgcattcttaacgagaaaacaaatcgattattccttttacgacgatttcagtaggcgtatacttttttcattttttagttttcaaggtttttttttattttccagtttttcaatatttactaccggtgaagatttggataatcatttctgattaatcatttaaagaggtaaaagtgaagagcaagtgagacaagagcagaaacgttagtagttacttgtgagacagaacaccgaactatttttgagggttgatgcactgattgttattatttccactccaatttttcctttccctttattttattttttttttataattgattgggaagaaagttaacattaacccaaaatatcaagattactatcgttgcttaattctttttattatattattttcattattattcatatttcatcactatttcctttaccaaacttaaccaagaacttataaagaaacatacattacactataggtaattgggatcaaggctaacctttaagctattaaccgatagttttactttccttcttagtattctctttttgtctgtcttatttaagttgatggaagagtctatctttgatgtatccaattctggaaagaagaggaagacaagatattccagaaaaggatgtctgcagtgcaaacgttcgcatttgaaatgtgatgagggtcaaccgaaatgtgggaaatgcgtcaagagaaatatttcatgcacgtaccagttaagtcttgtatttcaagacgtatcacagtcgaaactgaaaagcatgcctgtcattcattcaattatggattctaatgatggtatgattaaggagataccatcccagccgataggtagtcaaccacgcaagaaatcttcgacttcttcgacttcttcttcacaatcacttacacatacactgcaaattcaaccacatccacaaccgcatccacaagtacgtccacaagtccatcaacaagttcatcaacaggcacatcaacaggcacatcaacaggcacatcaacaggcacattcacaggcacatccgctggcacaaccgcaaggacaaccgcagggacaaccacaaatacctacacaactgccattgctgctgccgcagctgtcacagcaacaacagccacaacatcaacaacaacaacaacaacaacaacaacaacaacaacaacagccaccacaacgacagcaggaacatttacaattgctgtctaatataccgcagcagcagcaacaacaacaacaactttcaacccagcaagcagattcattacactggaatgtgaaacctgattttgctcaactgctggatttgaacgactttaacttacaaaatctcatttgtgtctccccatcagacgccaaattactgagcttaccaaaccttaatgccaaacctaatacctcagccacagaattaaagaactgggtacctcttttaaaaccatacgatataaattggagaaactttgtctggatagatatgttacaacttttagagaaagaggatccattccaaactgcatacaaaagtgtaaatccaattgcgatcagcgaaatcagaatcgatgatcccaacctaactaacttcatttggagatttgcttgtacgactttgatcgcgggtaatttcttgttatttcctcatgatagattcgataccttcatgcggtgtctctggtctttgaatgagaaacatacaattgtccaagatgctatacgatatgacatctcagtttttatgcaggacgtgtatgaaaatgcaaagttgcatcatttctcccaaatatgggatcgttatgtaagagccttaagtttcaaacaagtgttgggaaccatcaatgaaagaatccaaaattctcaagactttgtggagtatgtttgcttaacattcaccgtgttcctcatgttttttgctaatagtgccttgagaagtaatctctggagaactcatcttagaggatgtcaacagcttttgatcagagcatcaatattgatgccaaagggtcaattgaccgatctagagcagaatgctgctgatatttacagtgttttaagggattggttctgtcatgcggaaacagccgcttcaatcgcatcgaattttggaatttctttaattgatatcactgaattcacaaagactgctttccttactgaaagctctccgttgtcgttaacaggcaattctttcaatctcttgaaaggtatgtccaataacctcaactctgtgtatttccacctcttgttgcgaatgttcgaatttaaagacaaaggcgtcgatatttccggattaaacattttccttttcaaagtcaacggaacgacaaaatcagttttacctcaattatctatgttcggtagagaattgctggatgaattacagcgttcagcagttttagattcgaatctagaattgaatctcatcgacgtgactgacctaaggttgaaattttcaatgcttgcatcgcatagcatgttttactttctaatggaagtctatctcaaggtgtactttcttgatgttgatccaaaatctcctgagatcaaaagtattctatacacaatggtgaaaacttcttatagcaacccttattactcatcttgtggggtgtgctgccatccatcgttgttcgtaggagcactcacatgtattatagctgaagatgatgtgctttatgtccatttcatcgaccttttgagtaaaatcaccgacagcggaatggcagttgctaaaaatagtgtagacaagctaaacgccatcaaagctaatgttgcaattggtgcttatcagaatatcatcaatcctgatcatgactttatccccatctaagttaatattccctttcaatgtccaaaaaaataacgaagtcaatcactttaaatgaatcctctaaactggaacaaatatcatgccaaagttgtactatttcaattataatatagaagaatatagattttcaatcagttacttatttatcttgatgtgtgagaatatatatatatatctcccatccaaaattcattcaattaagaaacagcttttttagcgcacagattcaagttttttacggaatttttctgttattgttttgagtttaaggttcagtttagggaaaaaatgctcttcaagtcgttattaattcggaattaaaatacaaaaatggcgtatcctgcatatttaaacaaaacatagaacggtcgatgcagcgctcaaaaatgtaacaaaggagaaaacagcagagagtatgtcgtgccacaaattttttacggaatgctaactagagattaaatggtgatagtattcctagatttacttatgttgaccgtcaaaaacctcaattaactaaaggaaagctcgttttttgctttaaataggaaatgttttccacggaagtctaaaaaagttgtagtattctttaataaatttcaaaaagatgaggaagatcatgatcttcgagattttgtttgttgccttctcgataccatcaaagaacagtattagaggtgaacacctgaaagctcagaagccacgtaatagtcaaaacatcataattcagaaactaaggaggttgaatatcaagtttgatagattgaattcactttcaaatctccagaaattgaccgccaatgactatatgtttctttattcgatgccttcaggaatgagtcggtattcattgaggcagtgtcgcaactctggtcacgttttttctacaacaatcaggtaccaattttgtgaaaaaaaactgaaactttatgcatttaggcagtagacatggtaagttaatgaaatatgagatgagatcagtttatagagaatgagggagctatgaaaaagaacttaagctatataaccattggtatctcaaccgtttcagcgtactctgctcggtagatattattttgagagattctaaatatcaggccaagcaatcgggttaccatcatgtctgcgaaagctgcaggaaaagttgagaatggcgtaattaaacatacgaaagagagtgaagctgacaagagaaaaaatgctggacatagttataggaggaagagagggagacggtcaaaggcagaaaaatcagtacctgcagagaaggcaaccagtcttgaaattaccgccaaatcatcccataatgaaaatgcagagaaaaaattcaaattgagaaatgccttgaagttgcaaagaaaagccgaaattgaccaattgtgccatttggctgggtcagatattgtaatgttaaggaaaggacaatatgtcacgacctactcgctaacgtttattaccactgatcaagatcagaatcaaaagaaagtgaaatgtgttttcaacattccggtcgattatcctcaatccgccataaagctaagtaaaccgaaagactgttcttcagatgacccgttatcacgaattgtaaacaatttcaattataaatcaaaagctttactcaaagataaacagccgctagttatacaattaaactatttggttaccaactggaattctttgcagtctccggagtatataaatagggacacggtacagaagaatctgatgtcaaaactctctgattgaaaaaaaaacacagtagcgaataatatgagttactcatcatattcatcgaaatggtcattacagaagagggaaactacattatacacacgttaatattcactcactccttgacgaagactgcagcagctcccataccagtaccgatacacatgctaacaacaccaatttgaccagcgtctaattcccttaatatggtagcgacttgtctggcaccagtgcagcccaaaggatgacctaaggcaatcgcgcctccccttgggttcaatttcttcttgtcgatttttagatggttgacacagaaaatggcctgccctgcaaaggcctcattaatctcgtaaacatcaacatcgttgacatttaaaccacagtctttgaggactcttggaatcgcatatgctgggccaacacccatgatctcaggtggaacacctactgcctggaacgcaacgtacttaccaacgatttccaaacccaatttcatggccatggatcttctcattagcaacacaccagcaacaccatctgatatctgagaagcgttaccggcagttgtcacacctgtttccttcacaaatgcaggtttaatcttttgtaacgattcgaaagtgacgccctttctaggaccttcgtcctgcgcaattatagatccgtctggtagttcaatagggatgatttcatctttaaacaatccctgtgagacagccctttccgctttatagaatgactccagggcaaatttgtcctggtcttctcttgaaatttggaacttcttagcaacgttttcattagtaaatcccattggtatcatacacttagcagcagccgtgttcgatttcaactcatttgatatagacccaagagccttcggaccatagttcttagacatagattccaccccgatagccaaccctacattgatctgcccagaaatgatcttatttgcaacgtcgttaacggcagttaaccctgaggaacactgtctgttaatagccactaacggagtttgatatggcaaaccagcagctaacatcgcagctctatgttctgtcgcacctgcaccgggattcaacacattaccacacgcaatttcttcaatgacactcttatcaatgtcaactttctcaaaaaattccttcagaaactgtgtaagtaaataatccgtgttaacatctttgaatcctcctttgaaccctttaccaatagctgaacgatacgcagctacaacaaccacatcgtccggattcttactctttatatccttttcagaactgcgtcctgtcaaatgtttctctaattgttgaagtctgctagccatattatatttctgattgactgtactcgcctgtagtatacttatatcttgccctatgatgttcacttgtcaatcaattcatctgataaaagtcagtgataaaggaataatgtcagcatgacacatttatgtacgtaatttatacaaaaaattatttgtcaaagggatcactcgctaaaataaatatggggaataacgaacaatgagcagaaccaaccagccgtcgttttggagtatgttaaagaggatttaatgatcgcatacatcccttcttcacggccattaagctcgcagttaatcatcaacactgaaaagcagaaactttacggagctccacgatgtcattaacaatgatcctgacttaatctaactacagtctcaaatttgcctttgctcaaggctatgtcgtagaattggagatcggcattgtcacactaattccggttttcgttatgaaataccctaaaaatgaaagaccaacgtcgcatgcggggtaacccccaagttgaaaaaacttaccccgggtagcaaagaagatccaactcacgtgactagtatctatagattgtttcacgtgtcgcgtactgtttccttctggtctcttcttcctttccaaagtgcgtttctgagcttttgatcctgtttttgtttacgttttttaatttttgatccatctattaaggaacgtaacaaaatgaagcactaaaagcgtatgaaatttagtacacatgttttgtaacacaaaggaaatccataaatacgtacacttgaagagagtctaaaactgttctacaatcagctttgctaatcattagaattaatcgttttctttgacaaattgttttttgtacaagcgtttatctagtgaaattatttcgctatctcccagatcattattgaatgatcgcgttttccttgtattgatgagtatcaaatcacttttctggctataattctgcaactgaaaatcaacaaactttgaccgaccaatgactgttgataagaatgaaaaatccattagtattttgtttccgcttcgatctggatccattaatgctccgactgcaaatgccaagaccaggttttctagcaatgattccaacgatgatctggtaatacaagggctgaatctagtaggaacagggctcaaacctcgctcccagaccctgcgatacatgaaatcacacaacttttcaactccgaacgttgattctacgcgacatgtttctaaaacggataaaatgtgtttagcagacactcagctaccgtcagaacaagaaattgatgccaagtttgaagagttattgaatggacatgcgtttctaggtactgctaagcaaaatttgaaaagcttgtcgtatacccgtaaatgggaattgattcagaaggaaaagaaactacatggtgatataacgatgcaagacgattcaaaattgaatactttacatatgattttgagcaatttgaataagagattctcggttactcaaacactttatcaattggaacgtttacttcgacatgctgattttatttcgctgtttgtgaatgcaaacggagtttcgattttgaatgggttcattgatttattggataaaaaatcccagtacgtgtacttatgctgttataaagcattgcttaacgatacttcagcaagatctgtgatattccagaataatgattggataacttacgtcttctgccttttaggaacgctcacaactgaccttagagttcgtcttttatctacccaaattgtgatccttctgacatattccactgaatggtcagattctttgttggaatcgttagatttgtgctacgaaagttggatccaggcagtagaaatgactcttcgaaacccggaggattatgcgtttaacaactctttaattcttccaaaaccaaaagaattgctcgtagattactctatatctacattgttactggttcaatccattcaacaacttctgccttccaatgatctaaaactggcgtgtttcaaaagatggaagagagctggaatacaccgggttttccggctaatgaaggatttagactcatcagctttgaatcaggacatagacctgtatatcgaacttgaattgaaggtgcaagacaaacagttcaaaaatgagtttctgagtgaaatatcttatggtcctcaaatcaagagtttaatcgaatatactaaagatacgccgttagaaacgcctatttgcaatattatagaaacgatcttggagctagtaaatgaaagaacaacggaaggttcaataaaactgttctatgttttcaattctattctaacctatctatgcgaacataccttggatggtagctttgatgaaaccaacacggaacaagttttcatgacctcactagatcatataatggataacttacaatcccatcaaattgccaaaagagcaatgatggaactggatgaaaagaagaaagaatttgatggaatacaacttcaattggatacattgctacaagacaaacaggtttccaaaggggatctactgcagaaattagaaaataaagaagaacttttgaaatcaagggaaataagaatagaagaattgcaagacagattggaagttgtagaaaatcagctaaagaaagaaaagaaacagttggatctcactatcgcccatagagatgtagcagaatatacaccaaaacgttctgtgtcactgtttgagactttaaaagaacataaaccgcttattggtactcaacgatcaacttccttatcaaaaagtaaacgtatagcatcgctatccactgttgcaaatgaaaaacctcagtcaaaatatccgcactctaccccttataacatcttgaataacaattctgacgatgaccttccagtgactccgatatatccacgcaagaacgacatattccatcaggtatcagcactcccaaaactatcttccagtaatgatgtagtatcagcaacgaccacagaagttccatcagcccaaacagcatttgtgattcctgcttctattgcagcaccagcggctccgccgcctccaccaccacctttaccgcctcaactgaaaagtatagaagccttcacctcaccaatgaccaatggaccggccctagtaactagttctgcttcctgtgcttcgtcaaatgtcgcgcctccacctccgcctccacctccgcctccaccattaccatcaactctgtcatccctgaacaaggaatccacagtagaagatacatctttatcagttgcattcccaaacgaaaccctcccaggaaaaccaacagacggcattcctcctcctccaccgcctcctcctcctcctccaccattacctctagctaacaatgtgacattcgtgtctaagcctaaaccagaggtaaaaccgttgaagcagattcattgggacaagatagaggatattagtgacacactttggaatgaaccaacaactaggagtgacttaaaggaggacttaaatgaaaagggtgtctttaatgagattgtgaacttgtttgaacagaaggcagttcgaatgaagaagaaatccaacgttacagctagtaagaagaacgaaaaagtttctcttttgtcaagggatctggctcaacaatttggaatcaacctacatatgttttcttcatattctgttgaagaccttttgataaaagtactaaggtgtgacgatgatataatcaagaatcatagcgttcttgagttctttaacaaggatgacttcgaaactatcccccaaagtataattagatctttcgaaccctatgcgtcagattggaaaaccggtaaggctccgaaggaagacgtcagtaaattggaaagagctgatagaatatacctcgaaatgttttacaacatgagatattactggaaaatcagaagctcctctctcttgatcgctctgacatatgaaaaggactattatgacatcttgtaccaattacagaagatcgatgatgggacctcaatgatcaaaaactcgaatagactcaaacaatttttctacattgtcgtagagatcggaaactttatgaacaacaagaaaacgcagggtatcaaactttcctcattgaacaaactctccatggtaaagacaaacagtgataagaatttatcctttttgcatgtgatagaaagaatcatcagagaaaaatatcccgacatatacgattttacaagagatttgaataggttatctgacctggggaagattaacattgaatcgatagaaagtgagatacacgaatattacgaaaaaataatgagaatgaaggagtcattcgaacgtggaaaactctcgcatactgagaaacaccatccagatgacaaatttagaaagaaaatcagcgccaagcttcccagtgccgtcagaaaagcagaactgttacataatcaatgtaaactgactatgaatgatttcaacagcactatgaagtactgcggtgaggatccaacaaattccgaagccaaaaacacgttcttcagaaacttctctgaattcctaacgcttttcaataaaatatcacaagagaacaaggaacgagaagcaatgaatcgcgtacatgaacaaagacaacagttattacagaaggcttcgacagaaacccaagttgaaaaatctgccgatgacgaagctgcagatacgatagatatactgatcaaaaaactgcgtagcgttgaccctcaacagacaatccctggttcatccgttcccggaacatcatctcatccagaaaaacgttctacgccaagaaccaacagagatcaaaatctattatcacgagccatgacacttaagagcggcattcaaaacctgtgaacaacctctctcctctagccctcagtcacatacaaacttttcccgatccaggaaacccaagtacaatacatatgaacagtttaaacgtatatatatatatatatatatatagaccaacgccggaacaatattactcgaaaagtttcacataacttttccccacgaaacggaaaaataaagccctttaacgtcggaagcccaaaatttcgtgaattgtccaacctttcagcatagccaaactgacagtactccgatattcatgcaaatctcatctacaaaccggtctctgcttctctcttcgtaaccatacacagtctagatctaaaaacctagatctaaaaacctagatatattacatcagcatttgatacctaaacccacaaaaataacaatcctgccgcaactatatcgccaagccacaagccgagaaaagatgtaatcctaatataacagggtaacgcaagatatttgtactgtatccttacttaacgctacacactccttgtaaaccatcccatctcagttctcaggtcttacctatctctatgtccaccggctaatagcaagatctgcatgttctgatcggcttctatatttccgttttctcaacgtttacgactcgagcaaatacagcttctgctagtcagaaacatcaacacaacttcccgtctggaagcattctttttttttcgaaaaaatctaggtttaagagagatttatatatttatatatttatgtataagtgcagatacagttacaacggatctggagatctataagtatttagcagctaagtggtttggcagaacagagtatccacctagcataaaattaagaaggttagaagtagttcccggttatacactggatctgtttgtgctttggtttttttttggtctgattgtttgttacttggtgatataaggcaaagcgtggtttgagacctgtcttgcgatatttgtgaactgatcttcgaacagtgttataagtattcctttctacgtcgcgagttttgctagttttgacgaattcgtaagtactgtgtatcatgagtgataatactgttggcgtggccgttggttgtgctgtaggaatacccatcggagtggggattatagttgcgtttgggttttggtatcgaatgcagaggagattcaaggaagaagagctggaacacgacgggcattcaaattttgatgaagagatgagtttcaacgatatgggtgtgatgaagatgcagcaggctggtgagcatgttcaggagaatgagcacgaagttcatgggaatcacgtttcgtccgatgaaacggcatcgtccagtgaggagaagagggaaagggaagtggatcatactagtactcagctaaagaataactcgtctaccgggtccatcagtaggggtaaatcggggaaaaggaatatatatacgcctgcatatcgtaaacggttgcaggaaacggtttcctcaatacagaaacccatggattttgattcgagcaataacacgaaaagtacttctacttcgatcacgtctgcagatactccaaagagacagagtagtcagatcaacatgttcgataagatgataccgatgctgcccgatgctgcagttggtggaaatggatcaggatccatttttgacgagggatctgtgcccaggagaaattcatcgaatgaaactctactaaaaacgatcggaacactcgatttgggtgcatatccaaggcgaggttcgtcagtacaaatttccggtatgaataataataatgccatcaacaatcataatattaataacgctgataactctatcatttcgtcgagacattcgttaacatcgctgcatacacacatgtcttctccaagtacgaattcaaaacctataatagagaatgtattcgacacgccgaaaggttctaaagtgttgaccttaccagcggaaaacgattcatctgaacaatataggctacagaataattacgatatcagagatgatcatcacattgctgaagaagatcagtacgaaaatgagttcacgaactactcggagaataaaagggaatttatcgattctttgagaccaaaaagacaaacataaggcaaccgtaaaatggtactatctgtcactccatggaggaaatccattcatctcctggctgagagaaattcacatactcgaaaaaaaaaaatctcattaaccattgtttgccaaccggtagactcataccatattggagctgctattactatcatcattgttattattattattactattttaatctgtgtatttaatatttacaagatataacgaaaggaaaagtacacagttagcttacaagggagaataagggctaatgcattatgataaaatgatacataaataatgaattctcagttgaaaaatacacttttataaagttttagcaccaccgctttcctctaatagatcgtatttcttgtcatcaaccttgacactccattcgtggatgaaaaattcttggtgttggttctctctgtctgcaactaatcgaacttcaccgaccttacccttggaacccttcaagtaaaacttgatattgacattaccagcaacttgattaagctccccagagacccatggaacgagcccatcgaaatctatctgatcaccaagaacttctctaatcttaggcgaacgacgcatatggtatagggtattggaaataaccggagactgtgtcttctcatagttaaaaatcatagccaatgctgaggtcattagaacaatgaacccaacaaactggagtcttctcttgttgacatctttagttgggtctggtagctctctatcgattctcattggtctaaacttgtcttttaatataatctctggttcttgagaggccaaaaacctccttgtaagtattctgctcacagaaattccggatcttggtgcaaggatgcgtctaaacattgttaatatggagtttctagcctgtgctggtgttggcggattgtgtagcaatgtcccttccctgtttcctaatcatcgtatgttgtactggccagcttcttcgactaaatttttcaaatactcggatcttcttataatatcatttcatagtagaaatcaaacaatgaatcgagaaaaaggtatgaaacttgagtcaaatcagcaaacaggaaatcatctgtggccaaaagaatatacaaagacgaggtgtcttcaaataaaccacgtttattccctaaaatgacctttgtatgttatgctatgaagcctagtttgggttgtcaatcgtattgctacgattatatgtctaaaagatactaacatctatgctatgaaatgcgctcattccttccgaagaggaagaaggaaagagtgtgaattggatgagcaagactaatttaagatcggtaaaactgtacatttggctattgatgctgttttaatttctacctgcttggcaggtattaagagaaatactggattgacccctaagattgatcacattagcgatattaccgttagggaatattccacgaaatatttgaacttgggagagtcagtatatgattatacagtggcaactctaggatcttcatcatatttccagaggaaatgagatacaaaagacgaagttcccctttaataacttaatttgttttttttgtgtgatcttttcgctataacgggttagctatgaatgaaacagatgtgattgtaagtccttaacatatatttatagttagtatattcattatatatttaagtggttttgaaaattaaagttcggtgtaatgatacattgctggtttcagcttggattgatggcgaattcagctacaacttcttcggttgattgcttgtcgtccatttgcttctgctcgcaaaatttaaagatggcatcgtagccagttggtgtatcagcagcattttctgtattttgaaagagatcatttatgtgtgaaatactaggagacttccgttctgagctttttccatcactgccaatgttacctcccagtgagcgtagattctcccagaaatcattaccatcttcttccataattgatattgaggacacggtgcttggggttactttattcttgggtccattgcgatcaaaatcttcagctggtgtatttcctgtcgatcctgcagcactagagtttctggattcatttttacctcttctctttgtttgtttcctcttatgtccatgaagtccattcggacttggatttaacaatcggcttaattcaactgtcttggcgttttcactggatccaagctgtggcttgaccgtgggtggtaaataattgaaatgtgagtgcctacttggccctatttctctgatttctggagctgtaggcgatggataagatgcagtggaacttgtaggatttggtggcaactggcttaagccgttttgtgcataattagccccgttcattaaatgctgttgttttatgttctgctcttgagcttcatctagcgaatcatgatgatgatggtgatgatgatgataaaatcgttgtagtttatcgttgagagccgatggactttgagtttcatcgtccaatccccaattgttgaagtttggagttttggatagaaaatcagtttcgaagtcagagaaggacgggcttctaatttttggaagatcttgtgaatttgaagtagtattaccaatgtgtttattttgttgttgctgtggtaacattaacggaggtggagatatttgtctgggagccagataatggttgtgaatatgctggtgaattgatattttcaaatcattggccttggcatgatttattaactgttttaccaagtcagcgtttgatataacaccgttggataaggtatgacctgaagattccttcagactaaatttccagtcaactgttgtttctggttgttgtttcctagtttcgacattgggtattggaagaaatgtgctaggtgatggtaatgcagattcttttttgttgatgctgccaacaaaaatagaaggatgtggagagttgtaatgcggtgaaggcgatattatgctatttaaaacagctggatctggggtggctgtcgatctttcgttagattggtgtggttgttgtccatcattcgcattgatttttccagttttcaagacatccaacaatgccgcactagaattagttctgttagtcatgtcaaatatcataggtgtcgattcttctctctttacagtaccactcgggctcttcattgaaggttgtggcgtatttgaagttgacataggacgtgaaacatcttcgtcatcatcagtcttgttttccttttcgttttcttcacctaatctggtcatctcgttacctgcatccatgtttccagcttgtacagcgctttttatggtttcagatgcaacgcctctaacaaccatagtgataattttcctccaacgatttctacaggttaaacttggcctagcatccatttccgtcgatatttgcctccatttcgtaccatatttcttgaccttcgctataagtagaagatcttccgtctcatcccaaggtcgtagtcggtctttagtactgggatcaagcacttcgatgtacctcttcgcgcattggtcttcagttctattctctaaaacgtaggaaatcttaaaccattgcggaccatggtgttcatatgattttaagagaagctcatcctcctctggtgtccatttacctttcttcaatacaggatctaaagaactagtccatctctttttcacatccgtcgctttcttattatccaattcgaattgcttggcaagctgatcccagggaatttttttgacaacattactagattgctgaattgttttaatagatttgataccatccggatatcccaaatttactaacgattcgttaaccaattttctaagcagatcatcttcttctttggtccatattttcctcatctttcttctaaacgtttgataccctaaagattctgaaacctcaagagcattgactggttccttcttaactctcttcctcaaattgctcatatgctcctctgacatatcacccgaatcgtcactcacactgctagctacagttcctttctcactcgacgattcattcatattccagtcaaaatagatacttgatccaagatactgatttcttgatagaaaagtcaaaaaattagactgaaatcaagtttattaattaacaccaattttactacttctcaaccaatgtttttgagattgttcaaaactttatagcaagtgtatctcgatatttccgttatgactgttagtacaatcaatagatgacgataacgataaacttctttttgtttctgttaatgatattttgggttgaaaaccaagttgtaatttaatacagctctgaaactgtctacacagccttgtatctgctgtgatataggcgctgtattcaccgttttcacttcgcttgatagataccctgagagatactctacatagttatgatgtcaaatttgagtaatcttagtctggcaaatttctttattttctttttcaggcagaagggccctggcagaaattttgtgcacgtgatagtatccgggtaatgtttaaataagtatacatttctcaacatggattgcatctctgtcgaaaagctgctttcaattatcaacaataataacttcaggaacgaagaaacgaggtaatatatggtaacttacaggctacatggcagctgaaatactagttttgagtgttagtttaattattgtaaccgaatcatttgttaaattctaactttcaccacttatatgaaactggcgtagaaataatgacggtatcgtatcatcgaaaagggtttgatgacattagtgattattccagatcaacggtgataactgcagatgtctcttctaaaccatactatttcgaccggaaaggtatcaaagatagtttaaattctggtaatgaagcacgtgatagaggtagcgaaagtaggtggaaatcgttgggatataatactgtcctttcaactctttttgattcagcaaagacatggttttcctggattgatcctttggagcaagaaaatgggaaagatcgtaccatttccaacactactggagcaaattacgacagtttgaaaagaggagttgatgaggagtcgactccgagaaagaaaattcatttagactcactgctccaagagaaggagcatttaagggaacagttacaacattcaattactccaacgaaagaagtgttgaagttacctaaggatcctttccattgggataatactaatgaagaaaactatacagaatcctcacctacaagagtacaatatggaactagactctatagaaaactcaagcataagaaccagcaacagcagtccactgcattaattgctaaaccgtccgatgaagtatcatatttaaaaaatttattcaacggagaatatcatgtaccgattgagatgcaaaaggaaagggaaaatcagctcaaacttctttcaagagataacagccacagcagcaatgccagtacaaacagtagtaataacaacattgtaaggcttacagaaaggattaaggctttaattttggaaaacaggaaatcaataggcccaagtaccgaaagaggatctacaactgatgacatagtcataataagagagcacaagcttgatccattagaagagaaaaggaaacagatctacaatcagacgttgaaatttgatcgttctctccttacttttgaagaagagttcaaaagctattctcagttgattgaagaaagaaggaaactagtagagcaagtgaggaaaaccgccaaaccacaaaaactgatacctgatctatcaactgaagatttatcggaagtgaaagcaactttcaataggtctgataacgctgttctttcatccaagtatatgttggaagtaactgtgcgagatttcaagacattagcccctagaaggtggttgaatgacacaatcattgagtttttcatgaagtatatcgaacaaaacactgccaaaactgttgcatttaactcatttttttattctactttagctgacagaggctatcaaggtgtaagaagatggatgaaaagaaagaaggttgatattttagatcttaataagatcttcgttcctatcaatttgaatgattctcattggacattgggtataatagaaatgaagcaacacaaaatttattatcttgattctctttcttctggaatgaattcggtcagtttcctaattatgaaaaatctccagtcttatgtgatggaagaaagcaaacaaaagcttggtgaggatttcgaactttgccatattgcttgtccacagcagccaaacggatttgactgcggcatatatgtttgtctgaatacactttatatgagcaaggattacactttgagctttgattctaaagatgcagcaaacatgagaaattacataggtcatttaatattaagtaaatagaattaaactcttttcgttgacgaatactaaaatttgctattcttaccacttgtttcagactatttcaaacgttgaaatgaaatcatcttgtagacttcgcaactcttcaatgtcaattgttttttcatgattacaaaacgctttgagtttttgtactaaataataaacctgtttgatttgggtagtttgacatgcattatcacaagaatcttcctttgcaatgattttcaaaccttttcttttgctagctcgaagtaattccgatattttgtatgcttccaacataattctttcactgaaaattcgtttacaaatcatcataccgtatccttctatctcttctgattctgtggaggctttatatttcattttgagatgtgattcctgatcaatctcagttttcatctcaagatgtaaaacacgaggctttggtgccaatattttaggaatatctctgaaatgtgtcgatagaaatacagtagcatttttggaaaggagatattccgatatagccaaagctatagagaacccatctgcgatgcttgagccacgtcctaattcatctaggatcataagagtcttatctgttatatcatcaatgaaatatgccatgtctttcatttctgctgagaaagtggatgaatacgcctctatgtcatcattacagacacgggcatgaagcttctgatatagggggaaagatgcagaagtacagggcacagggcatcctatctgcgccaaaattgtaagcatagcaacttgtttcaagtatattgattttccgctcatgttacaacctgttactatctgaaacgaagagagattgggtattgcctctacatcattcgctacaaagttggttagtgtattttctaaaattggatggcgagctccactaagtgataaatgattaccaaacgatgctaaaatccagttattctctaaacccgttgttgcaagagaacacaaaaggtctagaactgatatagcctcagatatcataaaaagtgttgcgatatgagaagaaatattggataaaagttcactcacggtttgttcactcaaagctatcatctcacaagtaagctcagagagccttgtattcattttcattaagttcaatgtggtaaattcatacgcagttttcttcgtaacacgattgataaagcaggagtctaaatcagagagctggttaatgtctttcttttttagtttcaagtaaaactgccgattaacatcatgtccatggctgaaattcaatccaaatttatctctgagggagtccacttctctcataatatcatctgttaaagatttatacaattgcctgagcacgtcaagaagaccgtttgaacctctcttaatagcgtacgctttctggttttgtagatcgataggtgtagaagcccaacgtgtatcttcattgagatatcgattgatcaaatcaaagatgctgctaatatcatctgaactaaatattgccatgatttctgacaacaatttgctttcaaatttgctttcttcgaaaagtctcttaagcgttgttgcactctcaatggattctttcaacaatatgacataattgagcttttgatcaggaagaatgacggtgtgattgaacgagagaagtttagagaaaagagcatccaggtcatgaagaacttttagctccatcctaaaggaatttaaaaaatctgggttgttctgtagttcctgtacagcagaaactctaagctttaacgaattaatatcagttaaaggttgaagtatatcattcctaagcgctctatgtcccattttagtcactgttttgtcaattacttttaatagtgtcattccatttgattctagagtgttttctattaattctaaagattgaactgttttcatatcaatcaacatggtattgtcaccattatcaattctaactctgaagttgctaaactttaaagctaaatcagcttcagctatttgtgtcatgtagttgctagccgcagatactgccataagacaaaactctttaccgattaattgttccgcgaaaggtacaggagacttgtttgtaccaagtaaggcgaacttttcaagaacttctaatccctcttgaggattgtaaactttcgtggccgcctcgcatatctttacattgtcggaaatattgcatttgactatagtcgacaactttgaaacttttcccgacaatgaatgcgatggaatgaggatttcagtgggttgacagacgtatattttgtttaaagttttaataaagacttgagtatcaatgaattctgaaacgtgcatttccgcagttgaataatttaccacgcaaattccaactcgtgtatctgcatttttcccagactcgaatatgctaaatattgtcctgtcaggccctacaacaagtccagaggtagttgtagtaatctttttatttcttgacgtataccttgactcagatttggattgcctagtttgcattgattttctgattggcaaagaacaatccctttcctgctgatgatttgataattcaaaaatagttggctgcctatcgactttacgtttcttagatgttgagtgcctgctaacccttgaattattttgagattgattatccgatgtagtggttccgacggaagaagtgccttcgaccgaagacgattcaaaagcccactttgcgaaagatgtaacattaccagatgttgtcgctgtgttgttcattctttaatggttagattatttagctcaagtgctatttcctccgtgacctctttcaatacctcttcctctttcgtgttgatcttctcctgttgttcaggttcaggtttatttatatgaacctttgttttcgttttcgattccggcttaaattgtttgccgctgaggttttccaaatcttcgagccagcacaactcttgggcaagcaaaaaggctgcataatctgcagagcccttgaatatcagatcagtatcttggcgtgaggtcttgaaatcaccaactatctcacggttcagtagcaccctaagccacgaattcggtgcctccatgggtaacgatgcaaacgggtacacagttaaggacgtaccacagacaatacaaactgttttttccttcgtagagctatccaaatcccacgtatcgaagaactcggtaggtaacccttcaccgaagaatacaatcttcggtttaatcaacccgccacatccatcacaagtagcataatttccgccgtcctcatcggtttcttgttcgtttaatagtaatttattttgaaaagcttcctttgggaattctttaccacagtcaatgcaatggtttgacgcaaatgatccgtgtgcttctataatgaattcatcgctgatatttgcttctctttccaaagtatctatattctgggtatatattctttttaaccggtttttgctctcgaatagtttcatcaaataatggaacggagacggcttgaaattaccaggatacaactcctttgcaagagtataaaacggtttgggattctgttcgaagtattctatatcgaatacagcttcagcataaggaagattcagttttgataagttatggtaaagccctgtttctggagatctgaaatcgggaattccactagaagttgatattccagccccaaccatgaatataactttcacatcaggattatcctggaggtatttggctaactttttaatagccttcggtatttcagcagacatagggatgggcaatatggcaccgcgaaacgaaagctggatctataaaaatcgaaccaaaaaaaacactaaaaaagaggttcaagtagtaattactgaggtagtataccctagtaggtttgtatgaccagatatacgacgatatgtgggaggttcaccttatgaagctgattaatagatgaatatccggtatatagtatggataaagaatataattaacttaccttccttttcatggtggagcagagtgaaaaaaaaatcaaaaaagaaaacgaccccggagaggattgaactctcgatcttgcgattaacagtcgcacgccttaaccagcttggccacggagtcacgtttctggtgtttccgatttcctgtccaaccatactcgggtaacaaccggcttcaccatggtattactcataattccactttcatgccatcctgttgcaagcaggccacattcttcttaggctgtttcaatgcaaccacaacaaaacaatacacacattactaataccttctatttaacacttgaatggctgcctctcttaatacagccatctctatctattctcacgaacttgcggtcttttggtgggcattttttcctctttcgccccgatagcattctcaacccaagaattcccaggaattccctgggaatcccgagcattagcgtgacttaccgcgatagtgaacggccatattcttgtagcaaaggttatgtagccctactacaagtacatgtgaggtatgggttctgctatctatcctattcccgatgccctcttcgaaactgcccatgtcattagagtattctttctcacgctcaatgaagtatcgattcatcctacaaagcaccatagtataccatcttaggttatgtgtcattttcactagtagaatctgatttggagaaaagggaaggtggaaattggaaaactgaatagagacgttttggctgcctgttctaagttttggctatataactttggagtcaataaggtgaagttgtgaagctgttaagttaggacgtttcaaatgctgaaggactcagttatctcagcgtatggtattacatctttcccaatagcaagcttaatgatacctgtagctgtcaagagaatcaaagacgtcggtttatagcaggatatattattagagtgtgttgaagaatgagtttttctacgggctcttcttcgaagagtacctcatcggtagtggttgttgatgttccaaagccattcattcaggaagatgatcacacgaacagcgagaatgtagtaccatttgatcagtctgtgatagagtgtcgagatgctaacaatgaggaacaggaagctggtgggttcatttcaagagtttctactaaattggagaattatcacaaagagtccgttctattgaatcaggaaaatatagaacttccagtctacgataacgacttatttgatcctttgtccagagctgctacacaggatgttgtttctaggcgaaatacctgtcgtaaggattctgtagagggaagtataccagaaattgaagatgatgggttatacaatgcggatgatattatagatcctccgccagatggtggatatggatggatttgctgtgcatgtgttgtggtaatgaatttctgtacatggggacctaatacgtgttatggtgtgtttctatcgtactatttgtcttcgaattattttcccaatgcaactccgaccgattttgcagtcatcggaggtttgatgcttgggttgactttgttccttttgccattgtctgccatgtgtatgaacaaattcggttacagacctgttatgttagtcggcgtattactacagttcacatcgttcatatcttcttctttcgttacgaccattggggagctttatttcacgtatggtattctattgggttttgcgaatgggtttatatttggttgtaactcagtggttattccaggttggtttttgaagaaaagagcgtttgcaaacggtcttacccatattggagttggattaggtgggttagtcttaacgtttgctgtgcatgctattatggagaaaacgggatctcacaaatggccaatgagatttttggggatcatggtcttggtattcaatactatcgcagctctgattgttaaaatcagagtcccacgtaaccctccaccacagaaatcttctctgcaattgttgaaagatgtctatgatttcaatgtttacaaattaactcccttgcagtattgtacgctatggtccactatgaccaatattggatacgttatcctactattttcattatcaaactatgcattgtccatcggattgaattctcagcaggctactgtgacgttagcactatttaacggggcacagatcattggacggccagctatgggatatttctctgaaaaaattggtcgtgtcaattgtacatcgatctgtatgttttacacaatccttcttttaggcccatattggttcaacgtcgatagctattcagccatactcggcttcacatttttattaggtttggcagcaggtgtttcatccgttaatgtcatcccattgattgccgatgttactggtatggctcatttcccagctggattaggttacaataacatttggaatgggtccactgcagtggtagcagaaatttttgcattaaaattgagagattattcgttaccacaaccatacctccattgtcagatatttgtcttagtcatgtactttgtgggtctgttggcattaatcccttatcgcgagtggaaggtaagaagaatgttgaatgcacggatatccggtaagaacgtcgatgataagattcgattgaagtggcatagagtactagagcccggtgtattgaactatttcaaacgtgcattttatctagtaagatgctgatggccgtttgtagctaacttaaaaataaaacaatctcctgcatgttgtaacatctgctgttgttacaaaattactcttacttaataattaaataatttccgatcagtattaattaatacactgcatttcagacaataattatcatagattgttgataacatagcagtatatggtgctggcagttccgcatagcacaagtatacatgcatcctcattgcaaattacctcaaaagaggagaattccttcaatggggtatcagacggtagtatgacaatatctttggaagtttcgtcttcatttaactgccaattgttttgagtatctctactaaatcttaaggatttgatttgaaatgtgaaactcgttaatagagcaacatagaaagagccattttcgttaatccactgagcttttattatcgcatcatcgcactctataacacttactcttgaattgctgaccgcgtcccaaaaaatacaatcaccatcaatggagtaagagaagaaaagatcatcaatgccagcacaagcgaccataccagtaattggaccttcgtggaatagagaagcatcatccacatttgaggtgaagtttggtatgaaaccattgtttccttcactaattttgtaacaccctttgttatcaccttttagaggtaattgacacactttgtaaataaagccatcctcgcaaccaagatatatggaagaaggatcagatggcagcagtagcatactaattatgctcagttcgtcataaagcgacattatcaataggtgttggtaatacttgttatcttttttagtctgttcagtagaatatgataagtccgtccttgggataggaataattttgacatcgtcatcctcttttaatgataaatctaaggttgatatcagcttaagttggccattggtgctggccgccaggatgctatggtcattgaattttggaattataattgaaagtaccggatagtgatgataattagtggaaacaatatttctttccacctgaaagctattatttattttgactgttcgcagttcatataagatgagttttcctgtatagcaagaaagaacgacggaggtaatcttagaattaggattatcaataaacttgctccgtacaacattctgaccttggaataaaactgtatcaagtacctcaccagaagagacgtgtgtgatttgaactaaagagcttttcacgtatttggttacaagatgaatcacagtaaccagtaaattatctaagacgtcactggaaatgacccttgcttcagaagttgaatcaatggcaacttttggtgaaattgataaatacatgcttattttcccatcaccagcgatttgatgagaagatgacttgagcgcagccgcttctatagtctcctgtagtgaaaatgtttctttcttcaacgttgcgtagtcttccgctgaaacgacatttccgaaatcaaacacatccttttcaacaacttctttatcctccttggtctctgtaatatctgaagtcgatgcttgctgttctataagatcttgggaaggtagatgtccatcttccataatttcatgtttcccgtcatattcatctgtctgtattccgatatcatatgttatcacagcctccttaacagcgctcaattcaaactcatttacatcatctgtttgcactgagatctcaacagtttttacttctttcttgacttcagattcgttgttatttatggaattggtgatatgggaaatgaacggaagggtacaatctgctatctcttcatgtttcgaatcaatttttttcctttgcagctgaagagcctctattttctgcttcatcaactgtaagcgctcattcttgtccatatttctgggtatattccccctgaggttggtgttgctgatgagcgcttcttcactgacgcgttttatcttgcttcatgtatggatttgttaagcgtaaacaaaagatgataaataagatttgagtattatcaaaaatacgatgttacagtaagttggatgaatttcacaataggttggaggataacacattgcaagtaagtccttcttgtctgaatacacctttacagcaattataaaagccaccccggtgtactatccgaacacttcctccgctttgagtcctggtggtaggatcatatttctttagtacaatgagcattgatattgacgacattctagctgagctggatagggacactacagctgttgaacaaaatgcttcttcatacccagaccaaagcgatcgaactcaaggcaatgatgtctctcagataagaccagcagataaggcggttgaccctgtggctcccacacagtttaacaaaattgacgactatcaaaagctaattacacattggaagaatgaacgtatgagtccggagctgcttccatatccacatcatctcatgactaggacattaataaggattcaagaaagaattgaactaatagaaacactatcaatgggatacttagaagataatcaagagttaactgtcgattcaaagctaccacttttatgcatggaagcagaacttgagagattgaagttcctagttcgatctttcatcagatgccggttaagcaaaattgacaaatacagcatttacctaagacaacaatccgaactacccaataatgcgggcctcagcagactagatttattgatgtccaaagaagaggtgaagtaccatatgaagcattctgacatattactaaaactgtttaacaacgcagtacttaagcacttaccagaagaactgcaagccgttaacgatactgagggttccatcagtatgattgatgaacccgattggaataaaactgtatttatactagtttgtggtggggtagttgacgaaagtggtattgattcgaaattaacgaccgatgatgatggaaaacactgttactcagtgattattgaagatttaaatgaagaaatttacttattaatcggggcagtatacgtaatacgttatagtgtaatacgagatctcatgactgagggacgagtagttttaatataatgaaaattctgaacagtattactgaacctatgactcttcgaaaaatataggtttgtaacgaatgtttgccagcaataatttctcaacaatgttattgcgaacacagcatgttttctacctagtgttattgactgctggtctatagtgcttttgaaccaatttgtattagtattacatcaattaacgttgaaaagtctatctagcatactcaaagtgtacctatttttcatatttactgtatgcaaaacccatccggcaagcatatgatcagctcagagaaatccttcaatatctggtttctgggcttgggcaagcttagcccttttggttgtctgcggttgagattgagataacgacactgaatgtattcttttcaatcctgtagtcgagttcatctcaacgacagaatctaattcctcgatattttgcgagttggcatctatgttactggaagaggactggtttatattagatttggcatgttgtgatgatctagacttcataaattccataaacttagggactaaagctaactcctcctgtgtctgtttatgtagaagtgtcttgtttgttttctcattggtatccagcttcccctcgtggaacaaaccagtggtatcattgaactcaagctggaaagaaacagtgacatcattgattttatcccatataatttggatttcatcgccatcatgaagtaagatctttgtgcccggagtgattttctttccattaacatagcttgagttagtaccactttggcaataccatacatcatcaagaccttgagctggagattcataaatactgtcaccgacagcgtgtcttttcttcaatatgaagcaatgtatcctagataaacgattatcatcaattttacagttgcattcgtctgacctaccgatgaagaatggatttatcccttgttttacttggaccttacctgaaatagatgagccaggtaaggaatgcaaagtgagaaatagcccctccccattgacctttgtaagtggtctattgatctttttgttcttattgtttgaaagtccttcttcaccagatttataattaacattaatagctttaccagtattaggatttgaaaagttaaactgcaagttttgggattgtgcaattttagatggtgcaatttgtggttttttgaatacaggctctttattagtttctgcagcaggcgccgttatttctttcttgataatctctaacctctttttcgcaatgtatgattcgtattcagcctcattcatactgtcaacaaattgttgctgggacaaggattgtgagatggatatttgtgactgcatgctatcaacgtatgccattttcatccatggatgttgcagggcctttcctgcgttcattctttctttagggtccacattcaacaggcaatctatgaagtttcttgcctcttcggatattctataatcctttaatggtccttcatgataagagccccgttttatttgcttgaacaattcattctgagactgaccactaaaaggcaagtgacctgtaagaataacgtaaactaggcatccaattgaccacatatcaacaagtgaggaatacagatctcgattagttttatcttcagcatttttcccgtctataacttcaggtgcaacatatgctagagtaccacaaaaagtgttcaggaatgtattctgattttgtacttttgccaggccaaaatcggttatctttataagaactggatcgtcttgctctatcattatattatcaggtttcaagtctcgatggctaattccttgatcatgcatgtattttactgcctctaaaacctgtcgtgttatctctctgccggcatcctcgcctacagttccatgggctgctacgaaatccattaaatcgcctccgctgacaaactccatcaacatgtaataattatcattgtcttcaaaaaagtccttaagtttaactatcctggggtgatttaatttctgcaatacatctagttccctcttcactccatcaaatttatccattacttttctcttatgaattattttgaccgcaaatgttttgcctgttgacctttcgacagctttcttcacagtagcgaaagcaccttgaccaacaatcgaatctgatatcgaatagtatttgtgtattccttttaattctgtatgtcccattgatatctgatatttgctctttgaagatgaagcaggtgaagtcacatccttcatcatattgagttcttttagtctatttttgaaactatcgttgatgaaaatcactaaactaacgacatcgctgggaacgccgactccaacacttatttcatccccttgggtcaagatgtgattcgtatccttttgtatcctcgctccatttaaccatgttccattggttgatgtatccttcagcattaaagttccttcttcacccagcattagcataaagtgtctgttggacagtcttgaaatatcccccagataataatcacatccttggtttcttccaaaggtccatgtttttttaattgatgattcctttttgaatatactttcaggttgaaccttcaagtcccgtagacttatttgaccagttgtacatattactctgcacaccacatcgtcgtctattttctcctgagaaaacttatctattaggtacttctgtgtagcctgagtggcttgttgtgtcggttgcgttatatcatccatgtcaatatcttcgtttgcacagcaatgatcagttgatctctaaagaggctgggaaaggtaacggcaaacctcaaagggacaacttaatgcctcaatatagaacgattttcacaagtgtgctattctatagtcggttgtgactgtgtatacccactaaactgccaacacaaagctaatgaataatggaataaatcgttctttcataatgtgtatgatcgcttttgcaattcaaagatccagattatttcagaaaaatgtcaacctttaaatcgcgtaaatattcgatgaacattaaatattacaatgacgcgtaaaagtacatacatatatacaaagccaatgatcaaagatggatcagtctttactcggcactgctacaacgttggagtgggaatttgagtaaatagaacggaatcattgatagaagttctattatggcacattgcggcatcaggtgattggtgccgaatcttcttcagaactatgtgaagccggtttatactgcaacaatccatatggcatcaattagtaaataccatggttgaataacttgtatcagctgtttcttattctaactccagtcatgctacaaagactttaaaatctttacttatcaatagatggaagtaaagattataaatcgatatggttgctatcaagcataacactccgaattttcagaaattctttgcattttgctcatataacgttattgtatttgaactgttagagccttttcttgaaaaaactaggttctattcatgtttaaaacattcgttaagacaattccccataaccgattgaagaaatgatatatataagttttcgttttattaatactgcaataatgtccttcaacgagatagctatgtagtaaaattatatatcagctttgatctactggtgaaggttcaaatcataccgtcaactttaaccgtaatgttacggtaaataacaaaatcgtaaattattaatctcacatacctccataacgttatgttaagtttcttaccattctatctgctaattaaatgacctgttcccagaatcaggactggataaaaagtctactacatccgttagtttttcccaaggaaaccctttaaatacaagagccgggctcagtagtctttcgcgtcagattttgaagtctatttatatttactactagttcataaattggacattgtataggaaagatgcattcctctacataatatttttgttaaattaactacccatcattacttccctaaaaccatgtaaactgataggtatggtgcataccagtacaattggcaacagcttgcaacgttaagattcagtgatctcaattaaattacgattttgacagttttattttaagggaaaaagttgctttaaaacaggaaaacgacatcaggcaatgttttgcctcagtaaacaaagatacaattaatcgacaaaagctgggcaggttcattttttgttgaacttgaacgtctaatatcatttacttctgagaatagacgtaaatatcagcttatctgttttactttgagaaggttcgctgctaggtaattaaagttacttcgaggcttggaacaagatgggtaaggaacaaatcagaaagagacaaactaaaaaggtacgcaagggttcacaacccgtggcaaatggtaaatcttctgtagtaggggtctccaaagatgggaaaccagaattttgtgctattgatacgcccatagaaaggagacttcaaactctcagcgtagcatggtatgtcgaatgtattccgttaatgatcatcataatgttgtttgtttgggttaacccgttgatgtggtcgtttgtaataccatacaccatttattatttcatagaccggactgcctccaatgggaacgctgtgaagagacactccaagtggttccgatctctaaaggtctggttttatttccgtgattacttccctataagtatgcacaaaagcactgaactcgagccaacatttacaagtattgattccacagagctggaaaatgatgcgagtgagccaggctacctggatagctcacagcccgttttaccagataaatggtggaatcctttcagagaaaaggatgaaactgttagaccaacaggaccgaggtatatttttggctaccatccacatggtatagcagcattcggagcgtttggagcattcgctaccgaggcatgtaattggagtaaagttttcccaggcattccagtgtgtttgcttactttggtaaatcaatttcaaataccagtgtaccgtgattatttattggccttaggcataacatcggtcgctagaaaaaatgctatgaaagtacttgagaaaaattattcaatagccatcgtaattggaggtgccagtgaatcccttcttactaaccttggttcatctgatatcattttaagcaagcggaaaggttttgtgaagttggctttgcaaactgggaatgtgagtcttgtacctgtgtatggatttggtgaaactgatacttacaagattctgaagcttaaaaatgactctataataggcaggatacagatatggcttaaagagaactacagcttcactgtccctctatttttcgctcgtggtgtattcaattatgattttggtttactaccgtttagacatccagtcaatgttgttgttggaaaccctattcatattaaagaaaagatagatcatccaacaattgaggagattgatcattaccattccttatacattgaagaattgaaacgtctttacgatgataacaaggcaaaatttaactattcagaaaaaactttaaatatagtggaatgaaactctttaccaaaaaactaaataaaatatgatactgcctcgacggtgaggcagcattcagtattgtctctatatatctgcattaccaccagacactacaattaaaagtaaaataatccaaaccttgctaaaacgaaaaaacctccgcttttgtgagttgtactcagtctcaccgtttccttactctgtcactaacaaattctcacgtaactcatcaacagtgacatccttctttagtcgatcaatatatatcctttcccacttatttatattccgtgcaggttgtttacctaccgtaacaaatcgtttcgggactataagaaaccgaacatattttagaacctttttagtaagaaaaagattaaaggatggctcttagcatcacagaagtagagctgtacacgacgcaatacgattgcaaccagcatttccagctaaatcatggctattaagagattaattaacgagcatgatatggagttatggaataactccaagacgtttgaagacgtgattggatttattaataccttggcattgagtgtacggggcagagagaacaatgattacactcaaccaattagtgataacgtccaaagagtctctaacttgttatcaaaagtaacagaaatcattgggaagcatgaggttatcaaagatgctaatacctcgagattcggtaagatcgaatttagggatttttatgatgacatttcggagcactctaatgagctaatatcaaagatatttgaaggcattgaaaaacctgacacagggaagttggatgacatttgtacgtatttcattaactcttggggggataggtcaaggattgattatggttccggtcatgaattgaacttcatatgtttcttgtactgcttgacagaatcaaaggtatttgatctggagaacgacagctcgaatattgtattgatgcttttcattaaatatttggggataatgagatcacttgagctcaaatactggttggagcctgctggttctcatggtgtttggggtctagatgactatcactttttaccttttcttttcggtgcattccaactatccactcataagcatttgaaaccaaaatcaattcacaatccagaagtcgtagaaatgttccaagacaggtatctatatttcggctgcattgcattcattaataaagttaaaaccacagctagtttgagatggcattcacctatgttggatgatataagcggggtgaaacggtggtcaaaagttgctgaaggcatggtaaaaatgtataaggcagaggttctacaaaaattaccaatcatgcagcatttctatttcggatatttcttgaaatgtcccgagggcgttagtgaaccatcagcacgcgcacaagatcatcatgaagatgattcatgctgtactgatggatcgcatggtcatagtacttgggcggattgttgcggtattgcagtccctagtgcgattgcggcatctcaaatggctaataaagacgtaagactatttccttttgattgaataatattacatatgatgcgtataccgaaacttaactacccttatatataccaacataacgttaacaaacaataacatagaccgcaattcacgatgcattatttaccatgcgaaacgtaattgtgaagcggtaaatactgggggtgtccagattaatttttgaggatctatagatctcctcttattattctttagctttttgtaccttttcatcacatcgctattcaaatacagtacatgctgacctcgatagaaccttaatatttctaaggcttttgcagtatgaagaatatcagtggtagtcatagaggaaattgaactaacttcatcgatggtgatttcctggccgtgctctaccaaaagcttaatcaaggtgtcggcccagtatgctctgtaagataacaaacccaaatccgataacggcttttctggtgatccgactttaccctctttcttagataactcataagaaaactcgattaatagtctaccgtaacccattctttgatattgaggtagtgttaaaatacatgccacattataagcatcagctgattccttttcctttgagaaataaccgacaatatgatggcctagttcatcacgcctagtcatacagtaaaataaaaatggatcaacatcatagtacaacgttttatgatccaagaaaagtttagacaaaagacatagattacggcaccatgtcctctgtttccgaccatcaatttcaaagaaggaaacatagtcatctctatatatctcgttacctggaggatgtcgtagagtacatttctttctgtatcgttcatattgtttctttgatccgaaatattgtagggaaaaatcatcgatatataccacatcctcatcagtcaactctattggataaggtgaaaagtaccatggctctatttcatatttgcccataatcaccttgttcaaatttctaactctagccacctcattctgattctgtgtcattgaccccgatgtacgaagcttctttatttcatcttctctggaaatatcttcattaggaatcccttgtacattcaaattatccaaatccatcacatccccaccatccggagtagcactggctgcttgtggtgtagcacttttattctgttgctgcttctttttcttcgagtctttcttctcttcaagctctttaggcctaggaaaaatgacttccttgtctatctgtaacctatcagcagtgatccattcatctagacgtttattgaagtcttcataatgcacgtagaacttaggtggatctcttctgctgttaatggatagaatttcagcaagacgatcttgaccatcttttagtacccatgacttgcatccaacgaaaatctcatcgatgctgtcaaccttctggggaatcccaggttccttttcttcgccgtgactcatgtattagcgagctcgcccaaaatatttgttaaacagttgccttgccttactagttcctcttacagaggtgctctgtttttggatttggtttattgcgtaactaataagttcaaatattttgaagatgctaaatttcagttaatttattcagattaccgtattaaagcaaacaccatgcttgaacaaacatacaagaaaacctgacgttccctgtccttgactacgtgactgtaatcatatgacagttagagcaaacctcgcaattaatgcagactgaaatattctagatagatggaaaacggggacctaatagagttaaactacaaacttctacataagtcgctgcaagtagacaccagctagattagaatctttgagatattaacgtgggattccacggcaagccagggaatgtatcttctgtagcatcagggacttgcttccatattttgatgcttttgtctccttcccctgtgatgagtcttgttcctgtgacatcaaaggtgctgcataaaatcgatcgctcactttcaagtgagccagcaacttcagttgtcatcatactttggtatttgtgtcctgttttgtaatcgtaaaagcacaaagtaccgtcatctccaccagctaatagtacattatcgtgattaattgatacggtattcaaaatcccagtgttctgggattgaaagttggttaatagctgtccttcgggcaatttccaggatctgacgtcgttcgtagatacactggcaaagctaaactctgctgggtgtagcgtcaagtctctgatgtttctactatggtgcgttaaaactttgcttgccttccctgcaatgatatcccaaagtctaactgttgcatccccggaacaactgattatttgtgggtcaacgggaaggcatttgactttatttatagggcttttatgaccgggcagaaccattatctcagatcttgatcgtatatcccacaaccttactacagcatcacgaccagcagtagctattatatcaaggctcggatgaacatcaacggtatgcacgccagataaatgaccgtgaaaatccctaattgcagtatttctttctagatcccaacattttacaagtttatcttcgcttgctgagaacatataaggatgtctctttgagatagcaatatctcgaacactcattacatgcccgattagagtaattttcaactttcccgcagctaaatcccagattttaatggttgtatcgttgctaccagtagcaaaccattcattgtcaacggggtccacgcatacacatcttacccatccagtatgaccatttattaccttactgagtttccatggtgcatgccattgcggtttataacttcgagtcttttcataacgttccatcaatgaaatctgctgatgtggctgttggaacactcttcgtactagttggtcgcctggttttgtggtatgtttgactaatgcttgagagctttcgtttgcaacagttttcgacacctcaactaattcactgtacctttctaaaacagtcttttcttgatccaggcacttctgtaacgactcaggtaaataatcagcatgtttaaattcattattccaccgagtttgaacgtaaacatcatctgctaccttcgaaggttcagagctacggctggatgtattcattggtacttattagttgtctatcagttcgattaagtcgtgtaactctctttcatctttgtatatgtcacttcgttaacttttcataatatccatcatacaaaacggttcttttcgtttcttgaaaaatttcgagctcatctcatctcatctcatcacattgaagcagaagtcagttgttcaaatctggaagctgcgcttcttaattgcttataacaagtaccaggtattagtactctcgtgttaaagtatagtattggtataatgtcagaccaatctttgaaaagagagtccgaagctgctgcccagcaagaagatattaagaggacaaaagttggtgaaggtataaatgaaggtataaacaataacaacatcactgaaaaggatgttggtatcacgcattacttatcaatggataatgttggtttcaatggtcagatcaaacaaaggtacactgactttttagtcaatgaaatcaccaagcaaggcgaagttgtgcatttgactgacaaaggttttaatatgccaaagaagccaaagccaacgagagaacaaatcgagcaatcgcaaaaagaagaacttgagaaacgccaaggatttaaggtggatgaaggaattagaaatgaacttgttgaacttttgggagaagaggatgttcaaaaaattgaagctgtgtaccgctcaaataaaaagattgaaacatcgaaggcattcgatgataaacttgaaaggactaaaatacatcaactgctacgtagagctttcgacaacaagttagaatctgtaacgacggattcaaaccatttcattgttggaatggcttctcgccaaacacgtgttagcaaagaagaattgatcgaacaaactaaggatgcaaacggtgtcgaaaactggggttatggtccatcaaaatcgtttattcattttactgtctataaggaaaacaaagatactatggatgtcgctaatactttatcaaaattcatgagaattccaacaaggttgatcagattttctggaacaaaggatcgtagggctgtcacttgtcaaagaatgtctttatccaaaattggtttggacagattaaacggactaaacaagggcttgaagggtgtcgttctaggtggctacaaattcgaagatgagccattgaacttgggagatctacagggaaacgaattcactattgctatcagagatgtttcattgaagaatgaaggcgatgatttggatgatatcctagccaatggcatgaaatccttggaacaaaatgggttcatcaattatttcggtatgcaaagatttggtacgttcagtgtttcaacgcatcaaattgggcaagtcctattatcaggtaactggaaacaagctgttgatttgatcatggctgaacaagaaaatgttttgccaatttccaaagaagctagaagaatttgggcacaaaccaggaacccaatctatgcagccaaagcaatgccacatcagtgtttggcagaaaatgccattctcaatgcactatgtcatgaggagaaatgtgaaacatcaaacgattaccctattagctcatatcacaatgctattctaaagattcctagaaacttgagaactatgtatgtgcatgcttaccaaagttatgtttggaacatggtcgctagcgaaaggattaaattatttggattgaatgtcatcgaaggtgaccttgttgttgacgaaacatctgctgctgagtctgatgaccaagccaaacaggacgaggatgactttgatgaagacctccgcgaaacgaagtttattcgtgcaagaccagtgacagcagaagaagttgctgctcaaactttcaccgtgaatgatgttgtactaccaacacctggttttgatattgtctatccgagcaatgaaaaccttcgccaactatatgttgacgttatggcaaaagataacatggatcccttcgatatgaagcggaaagttcgtgatttttcccttgccggctcctacagaaatgttatcaataaaccaactgatatcgaataccaagttgtttcatatgaaaacccaactgaccaattgatcaacaccgatttagaaattctgaacgccaatagaggtaaagacaacggccaaaaatacatcaaatcaaaactagaaagatacatgaaagtaaaggatggtaacaaaaaggcagttattatcaaattcaaacttggagtgtctgcctatgctaccatggtattacgtgaattaatgaaggtggagacttcacgccgtggtgacatgtgtaatgttagtgtctgatccccgacaaataagcatctcaattattgttgtatactgtaaattagcattcttttcagaaactcttctttggcatccaagagataacttccttcctcttctactgattcttagggactgtaaaatctttattgaaagagggtcgcacatcgttttcatagtctgactttcatgtcagtattcctttcgcaatacaaatctttttcttgatatatcactatgtgcaaaaactgacaccgtgaggtcagtgtcacaaacctaaagaatcggactataaaagcaggttaaattgtgagaacagttgtcatatctgtaccaaccgaacattatatataaacggatttgtaacttaatacacacaacttttaccaaatagccaataaatcaaacaaacaattgctactcaaccatagtcactcatttttttcaacaatttcattgtaaagggataatacaatagcttaaatgatatcagaaggtagtttcttggaccctcaaattgaagcaacgttatatggacaaaagaaggcctctaatttaggtacttttcaaacaaattcgactgcgagcaagacttcttcgttaaatcgagagttatttgggttcagaaggaaagctaggcaatatttcgagacaacgacgcaaaggtttcgtgaacatggtaacgataaggagttgatgagagcaggggtcaattataaaccaagatcagaagatgaggaaatggaagaacttaataagtccaagcttatgatggatatgttatttgaaaaagcgaatcatggctccaaacaggattttgacaagcttggtggaactggaaaatatggtgtgcacatatcatcgactccgaaaagtgtaccggaattgctatgcgaagccgtctaccaagacgttcatggagaaatatctttggcaagtcccgagtctgaatcaattgacatttctaatagtgctggcaggagagtagttatattccaagatttgctcaagaacattggcgttgggaccttattagctcaggtcagcggtggtcctttggaaaaggtgctatacgcttatgacaataagacaggttcccgagatgtcgtttatgttgaattgcatttcttgttccctgatgatgctgctcagtttatgaaatacgccagattccacctattcaaagtgaacggtgtacatttagttccacattggggtgtaatagattctctagactcctctgaaaagagtcttttagatattcaacagtatgttcatccagatttttgtaaagatattcaaaactttgactcgactggagcacgtcgctgcttaattatgaagaaatattcaaggaaacataagtcgatttctacagagttgaattcaaagtctcacatttatgatttggatatccaacaaataatcgatgattttaatcaattcggacaggttctcgaggtatcaccgttgatttctcggaaaatatgtttgcagatcagtttccatgatatcagaagtgcaatagaggcaatgaggagttatgagacttccaattcctacataaatggcaagtattttaaagactggtccatctggtatggtaaagacattgtagataaaccatgcattgaagtgtagataaagtttaatattctataactaaatagcattttgtacatatatacataaacacataaaagaaataataaatttgttcgaggttcttatcacttggtggttaaaaacgaatagtttggtttaggttggctttccgtctagtactaccaagaatccacctactaaatgcaacgatcccgtaacaaatacgtcaactggttcacccatattcttgattagatccaaagcagcttcgattgatgaagtaacttctacatttctgtgttcagtttcatttaataatatccattccttctgcaaattctgctgaacctctagtttgtcaacttgctctttagatgtgtttaaggaaactaaatctgcactataattacctgtcttccacgtcacattggtcgtgaatattgcagcatcaaattctactgcgggagagatagtttcatataggtatcccaacagcgcttttgcatcccttgactgctgattgaatagtaaaactttttttctattgaaggtcgcagtcacgtccctaaaccacccactggcagcttcgatactttccttggtatgcgcgccatctatgtaccatgtaatgttattggagcgaatgatttgacaacgtccttcccaaacggtttgctctaagccttttctgaatagatcagggattttggcagatgacgctagttctaatggttcttttaagatatcaagtgaaaccaaatgttggtgagctaatgcagtagctaaagatgcatttttaatctgaaaatcaccagcgatgcccaacttaatggtttttaaatgttcaaaaatgggaacctcggaaagtgtagtgtgtctctcagcagctctttcttgcaaaacctgcgatccagttttgggttgtgattttactgtgaatgcaggagcaccttctttaaagataccacctttattccatgcgatttcttcgatggtattccctaacatgaatgtatgatcaatacccaatgcagaaacaccgcatacggttggtttctcaatgatattagtgctatcaaactcaccaccgacaccaacttcatatatacacgttccacatccctcttgcatgaatacatggaatgaaagaagagtcaagtacttgaaatatccaggtttttgaccctcagtcatatgaggaaacttgtcttcattggaagaagtttcgtccaatctatcccaaacttcaaagaaatatttcgagaacaattcctcagttattggctccccgtttattctaattctttctctcactgaccttagatgtggagaagtataaagaccaaccttactcaatgtatctttatattggttcaagataccttgcgtaaacgcagcagttgaacctttacccttagtaccagtgatatgaatcacgttcaatttgttgaagtcagaaactgaataccctatacgacgtgaccattcttgcatctcccaaatgttcatcatatttttcctatcacctgatgctctgatagccataatattggcatagttagattgtaacgaattcaatgcctgaacagcatcctgataattcctattcgccattttcaaactaagcggtaatcgcatatcacagttcaatacacctccctcaattaacgaatattatcgaatactaccgcttgtgtcggataatacaattcagtagaagatgagtagtaattcagaaaatgcactgcttcttatcagttaaaaagtcaactcccaaagaaacctattggagtgtgcaagcaaggattacgctcacgacctaggtatcattcaaagatctcaaacttctatatgcacataatctgtaatttgaaatatactcgttgcaaagtacgcttttgaaggaacctcggtaatcatcaacatttcatatgcatttggttcttcgagagccatcgcgaggaaaaatgattcccatattattacccggccactgaataatttttccgaaagtgattcaagctttatttttctggaaaccgtaaaaccaatcacgtgaatgcatggaatatttgattgacagtttcctaaatgatttcaatcaaggaacatgagaaacgtatggaattccgttagatataacatagctgttggtgtccatagaacagtgcaaagcagggaaattaaattaataactggtgttaggcattgctggtattttcttcttagctgttttcaattttcggtccatattttgaagcacaattgccagcagattgtttgttaataaattgaaacgacatacggttagtgcgaatctcttggaaaaagacgttttatttacaggtttttgtttccaacaaaggttctttattggtctaactttaaatttgaaattttggaagcattttactacctgtgctcattagttgacgtattgattctggttggtttgggatttttttttgtttttatctgtcctgtacgtggttccgtcaggttgttgtcttagatgaatcagttgttaaactaacacgtcgcggaatgttcacaactagagcggagcaaaacaatatcaaggccactattgccgcttcctacgataagctatatagccaatttagttcggatgaattaagtgaaattggcaactataaaatatcgaaatttatcggggaagggtcttttggtaaagtgtacttagccacgcatagattgacccatcaaaaggtggtgttgaaaaccggcaataaaagggaccctaatgtggtacgagaagtgttttatcatcgtcagtttgatttcccgtatataaccaaactttatgaagtcatcgtaactgaatctagggtctggatggtcctcgagtattgttctggtcatgaactttatgaacatttactgaaggagcaaaggctttctcttgaggagtcaaagaaacttttttcgcagatagctagtgctgtttattatgctcatgaattgaaatgtgttcatagagatttgaaattagagaatgttttattggatgggaatggtcacgcaaaacttacagacttcggtttcacaagagagatggctacaaggtcgcagttagagaccatttgtggtaccacggtgtacatggcgccggaattgattgaaaggaaatgttatgatgggtttaaggtagatatatggtcacttggaattattttatatacgatgatcaacggttacatgcccttcgacgaggatgatgatatcaaaacaaaactgaaaattgttaacgatgaactggatttcaatcaagagtggatctccgatgatgccattgatcttatccaagggatgctgcgcaaaaatccgaatgagaggatatcattagcgcaagttctctcgcatccattccttcaaccttggggtgtagtcgctaaagagaaaactgataaggtgttgctgaaacagcgaggtggtcatgttcatttccattcgaaacatgaaaagcgtttgttgaaaagattgaagcaatgtggatttgatactggttctatcaaaaattctgtcaacaaaagaaaatgtgattccttgagcggcttgtggtttttacttctagaaagatacgaactgagcgatgcaaaggtaccgaaaaggtcaaaatctgtaatgtcggtacgaaaagttttcgaatcatctgtaaacatggttatggatgatattttggtgacctcacctgaatgtgttaaaattaactcattgaagaagatactcagtcgtaaaagtgtagatcaagatgttgagctgcctcagactattgaagatgtgaaagtacgaacgcaacccaaggacaggaaagctgctgaaccggagtcaatacatccagctgatacaacaaacaaaaagaaagggtttctacaacgagtttcttctcttttcaaacccaaaaagcataacaatcatgtcgatgataatcagtcaataaaattttcttcccaaggcatacacccgttgctaggcaaaaaacgacacaaaaatggatcgaatgactcagaagcgccttccatctctcaatcaactaagccacctcctgaacaggaagacctcaacgtccaatttgaagatataactaataaggctaatcacagttttaagaagttgaaatcacattcatcaagtgagatttccaagaacattaacgagcctcagttgaatcatttacacattgatggaggaactgaagattcactgaaaatatcaaacaacaggggtatcaggcggtcctccattgcctcgcagcattcagccatttcaaatgatacgttcaactctgactactctactgatgctcaatcggggttcagatctaacaacactcaatcttcaagtaggatcaacgcaaattcagaaacttcagcagccactcggaagaatgtacgaagaacgttgagtgtattatctagtgcatctagtaactcagagatgagttcaagaactgactctttctatgatataacgactgcttcctcgccaatgaatatggatatccgttcaaattacaacattcgatcggattctcagttccctaaaattaatggtaactctccatggctgatcaaaagaggaaaatctccgataggaaggcgtagccgaatatctaatcgttctttaaacaggaaattcaggcagccaactcccaatagagctgattctgttattcaagaagagagctctttcgatgaaaatgaacgcgcttctaatttaccagaggtaagcgagtatgatagtggtgaaattgccattcacagcgacagtgagacaccttcaaaaggaaatactccgctgtatgctattgggattaatcacccggaatccagacctgttttgttcaacgttggcagatctgtaagtgatggtagcagctggtcacatcctcagtcggatttccatgaaccgttgagtgctccagtaattcgaaaaagttctcgacgtcatgtagaggatgatgactatgagtctaatattgcagctgatgacgaagacaattctttggaggatgaggaacaagaacacgtaagatcaatagccgaatcggtctaagacttcatatgtgtatagattcataacttttttaactcgttgattgtattgtttacctaaaacttgaacatttaattcagaagcaagtatcacggttcttgcttcttgagattctgtaaaatcgtttgaagaggtccggaaggagctccatctacagtgagtgacttgacaaggtcagcaattggagagcattcagcagacacatcttgtaatgattggtgaagttcagaaagtgtatctaactcagaatctgcaatctgatctttatcagcatcgctgtccatataacttccacgcaagttagcaatgtaatcgtcagctaagtttaacccatttttgaggaagaattcaaagaaatcgtcttcatcgatggaaatatcagagtccttttcaagaaaggattcttgttcattatcaacatgcgcatcaccattcacgtttctctcatcagaattatcattgatgattccctttaaatcggactcatcgttcaaaaaagataatagattagtctttaaggtatccaaactggtggcatttaattcaacatcatcatctgggttaaggatgtcccattttacgtttgctatctgaaagtcctctgtaatgattttatgctcctgtaaacaggatagtaacgctttcggttttaacctgttattgctatttaaagttaggatatcattgtcaatcatatgatgaattgaatcgaccaacacgcttccaagagtatcactgtaaaagtcaagtttattgtttagctcttggtctgtactcgtcaaatcgacgaacttcttaacaagagccaagtgagattgtggcgcaatgacatctatcatatgaccatcttctgtatgtttttctgttggaatcgtctcaaaagaagacgtcataaaatgagtcagagccaagcttaccagtttaggattgtatttcaaaatttcggccacttttgaatcagtaattatagttttacagcatttcagtttgttaagagtagagtaggggaacacttttaggaagttctttcgtatattactttctagatccggaagataggaaacttttgagctgtctttcttcaaaaacgatagtgcttcgtatttactaaggcctcgatcataatagaaagtaatcggtatataactgatcttgcccattgttatccatattctgttattactaactggaaactctagctcagcgggaataatctcattggcttccatcaatatgaattcaccgtctgtatcacataccttaataaatgtacacggtcctgcatgtctcgagaaatttagaagtatggataacaccaagcactcctcatcacgagcgttatcccctacttgaagcgagccaaatatatagtattctccagataaagattctctgatctcaagtgatacaccgttataaccattccatgggaaagcttcattccagggttccaacattgaagacaactcagaaagttgtgacttaagtataatttgatcttgatctttaatcaactcgtctaggtagaatatcccaaacatcatggtagtttcatgttcctggttgaatatgtcatcgtttaattcagttgtttcctgctgccatagaaagttatcattcacataaggctgagtcttagttactagcatctagttgtttgtatagcccgtctgagcaactgctgattcacgtacgtgttgaactgctatttcctggatttcattatctccttttatctcatgtcatctcatcgttcatttcatgtatttcatcgtttcatctaaattgagaacattaattaaagacataattaaggtttaccaagttcgaacgagataaaggaagaagacgataatagggcgtagaataaccaatatcaatggaagagctgcgagaacgtgtttggcatggttcactcaatgtggaaattatgctatctgattcgatagtagtaccgaatacccctctttctgagaaatgctatcacatagttgttttgcgagaatctttcttggcattatatcttccagcaatagtacgaaagcttggaaacaatgtgattgtcacgtatgagaacccttataagcagtggtggtttgaatatgatggagtgcccgttccttgggagtatccttgtggtgtactattcgactttttatgcaactcttcgaccacttcaaccggtaaagaagatgatcaacgactacagatgtggaaacttaaactatgtcacgggaacaaatatccacctgggatacttccattggttgatggtttgcgccaagtaaaagatcactggaagcaccagtggaaacaggcatgtttcattctaaatggttctgcgaagcgtattatgtcgttatcaatacctgattttgaagctttctggcagagtttaatatcgagacatcagccagactacatcaaggttcgggagaagttgctcacaccgaataaaactaaacatatacctataagagtgtggactgcagatgcatcattcctacaaccttcaatacccgctaattccgacactatgacgctgtttgatgttatgacttcaatggacattaagcttcaggaaaataacagagcaattatacaaggcatagtgatctgttcggatgaggacattattaatttatatgatttatttgcaagcattgacggatttttatatgtagtcatcaaataataagcttcagcgtatatatacagtaaaatagatattgaaagttcggagagtttcattagtcaattgacttactcagttgaaacatcattagggacttcaaaaactgcctgtaaccatacacgatacatctttagttgtcttttacgattgaccaatagtcttctgtctgttccaatctgtttctcaacgaaatatttttcagtgaagatgtcgcgcagttcttgttcagtgaagaaatacactcttgttccatctcctctaacgtagaaattatcatccagtagtctattctttttgaaccgtacctgagctagatcataacgtccataatcacggaacagtatcttaccacctggctttaggattttatgaaggttatccattgccttactccattgttcaggtgatagtgcactaaacacgaagatcataacagcaatatcgacagaatttggctctatcccgtccggtaattctccttcaatatttgcaagatcccacactgttgcgtgtccatattttggattgaattgatctgaagtcttcactaactcgacagctcttggagcaaagtcagctgctactattctcaattgttcgttttgattctcagtcagaattgggaagaacgtgttaccggcaccacatccaatttcaaaaacggtaactggaccagcatcaggtttagtcgcttcatataaagatgggaactcgatttgaagccattttctgtctttgaagaaattttccctattgtttttataaaatatgtcccagtaacgagcaggattactattgtatagattcttgtcaaattctggaacagggtccttgtattgtttttgaatcttttcttctgcagccaaaacttgttcttcaccccattcgacattatcccaggcattatggttccatacttcgtcgtcagccttcaatgtacgttttccaaaatcaaatggttcatcacggcctattcttgtatcttttatctccaccaattccaaagaagatgataagctttcatcgttggtgaaagtcgattcaagatcattttcaggttcttctgataaattagtcttgcctaagcgaattttcttcggcagcaggagctgctgattcactgtttgctgcattcttcttcttcttcttcttcttgtttttattcttgttgctagacttagaagcaggctcgttcacgtcttgagtatcaccttcatgctcggcttcatctttatctttagcctcgtctttggcttcagctgaggcttcagctgaggcttcaggtgtctcttcagcctcttcagccttagtaggttcattttcagctacatcttcagaattttcttcgatgacaggttcactttcttcaatttcttccttgacactttcttcaattacttctttgacaaccggttctgtttcctgagctggctcttcttcctgagctggctcttcttcctgagctggctcttcttcctgagctggctcttcttcctgagctggctcttcttcttgagctggtttatcctcttcctcggccgaaccctcagaactaacctgctgtccgttcacaggactggtttcaacagcggaatggttcgaatcacccttgtcctccacaggatccttagcgatgctctcaaatttctttatcaaatcggcaacacccattgtcaaatcttctattaatgctgtttcgcactgttttgaattccggttgaagtaacgactacagacaagcggatcgactgaggcaggcctgtaatgtacgttctcttcggctcttctcgttgacagttttgttgaaaatttttatgtactggatcaaaagagacattgtaaaaagtaaatagtgggaagttctgcgaaatcaaatgccgattaatgtaaaaatacatactcgattatgaccacccttctacctagatggtctcaattaagggtatgcacttcttacctaagatcatctgttttggaagtttctgattcgtcattcgtttggtattatggctacttatgtaaatttcattaattatcaagtttaaaccgaccatttattaaggttggcatctcgaagatgaagaagaatacaaattaagtaatcttgatcgtgggaaattgatatttcgtaccttgttgaatgcaaatattcattccagtacgtaatattatgttccccggttgaaaaccttttttggtccaggttcaaattaggtttcccatccggatcatttgatttgaatgctagcttagtatagatatcaatggcagaaggtcggtcggatgaatgaggcagggttttgaataatgattcctttgaagcccatactccagctatgtatattgatttatgttttagcgatgagccgctgtttactagcgtctcgaactgttttatttcgtaaggatgcatgaacttcttgagtattcggtgtaatcgagatgagctgtttcgttgtaacaatttctctaccctcggcagaaatacgatatctgtggctgcagatatcacatttgtgtttttaaggaatatatgtggtaatatcatgtcctagttacaccggctaacggtgtattttctggtttgttcactttggcgatatatagtttctgtcattgtttaaacattgaaatgttattatattgttctataaaatcaaaggttcgagactaattacattttgatgagaagagtgacacagagagagggagagaaatgtttcccagtacagttacaagtaatgtcagtgctattcatttgagatcttcaaataattccggctcaacgtttgtcaaatccttcccaaagatgatggcatcaacaggttcatcgataccattcagaatagctactttgggaaccaatccaattctagtgaacttcaacttatcccagatcttccaactagcaggattagtgacaaataccaaattgaataccgaataattataacctaataaaggggcccatttcaagtaaacttgtcccagtctatatccaatctttttaccacggaatgtagggttcacgaggaatcccgcgttacagttatgagaacaacggccgatataattaggtttaacgtagaacgtacccaatacgagctcatcccaattgttccattttggatcgattgttttctctgttgtgtttagtacaacgacagcgaacgaatggaaccagtaatcagtaaattcttctttagtatgctcaccgaaatgcggataacttgtgccagattcaacttcttcgttgaacagtttgtacaggaattcaaccagcgtcccgggaatctcgtccgctgaaaagattgggaacgcagtcacttgctgatcagaacctttcaaatgaaattgcaatggttctattgagtcaacagttggtttggtaaaaatcgaaccgtttcttaggttgaaagtagacataatgaattcagaatttggatggtgtttcggatgatgttcacagtaataggaatgtgttcattcggtaaatagttgatgaattgtatggttattaacctacatgactctggactggctgcatttgaattttaggcctgtgaatctttaagtctattttatacagcacctagaaaaaaagatagatatgcggatagaaagatagatagagatagagataggccatatgactcattcgatacgttaaggctatatacacgtacactagatcgaattaaactagatctcatttgactcaatgcggcaagtggcaaatcaaaagttcaaaatccattttccttaatgaaaccggtgaccattttgaataactccttttgtgaatcttcttccggaacggcatgagttgcacccttgataagaccggaattcttcgaccataacttcttatccacgaaacattgccatctttgcaatagttcaagcggtttcccattatttggatagcattcatccttctcggacaatgcaataaggaatgggtctttgatgtaaccaaatgtgatttccaatttttcatcagagagatctgatgaaaagaagtcatcgtcaccatcgggcaacaacaacgaacaccatctataagcagttatcggcgtatctaacatacactcagcgtgcttcgaagacaataattcctctggtttccctgcatcaaccaaagctttagcttctgcattcaattttgataacaacggttgaggaatcacagtgctaccaaattctctatcagaaacggctgcctgcaatatcccaccggaaatcttgcccggatgatgcaacaaatagtggatcgtgttttgagatccagtggaatgacccatcaacagcaccatttctctcccatccttcttcaaataatctaccaacgagtcaatctcttcgtcatcacgtttcaaagaaccagttccaaacccgatataactactggttatctgaatttggaccaaagagtagcccaatggatccaatgccttggctaacccttgcaaataaggaacagtcaacaatccatcggtaagtccaccaacgaatatcaaggctttcgatttaccaatcgggtcaaattcaaaagctactcttttttccttaaaaagatgcaaggtgccaggaacttttgtgctagacatcttttgatttcaccgtatcctcaattaactgcaccgatctcaattgagcagtacatatacattcgtcctactctcactaccagaaacatctctggtaagcatatactcattatcaatgagcacttatacattcttactttcagatagatagagagaaagggtgattgatatgcagggcgggaataaaaactcttggcggacataggaaaaaagaatttgatcacgtgatgaatcacgtgatttacctctttttccccgcttttattatttcctgctgattgcgtctctggcaagggaagaatcccccggttttaagactttcgtctccggattgctaatatctgatgaaaggcttgaagaggagtccgggcaatagttagtgacgtccgtcactcagttgccactcaaactttagttatggagaattaaatggctataattaagtacgatcaaacatctccaaatgatttaaaccctgaaattacgattacgacattttattagtgatagaaaccctggatatttcacatttaaagagacaagtaacctgacttttaatctaaccagttgccttagtctgaaatagtttgaaacaagaagtttcgttcctggagctctctataagttttgttagcgacaagtcagtttgacatattaagtctccttatggaaacaagaactaaaaaaaaaacaactagtttgatataacacgcaaaagatgcctgatatatcggtgaaagttaagctcactaaattacttgttcagcttcattatcatattttgaggttggaccttcgaaatgtaaaaccaaaggggtatttgtctactttgttgcgacattgtttgacgttggttagaagttcttcggaaataggacaaggattagggtcaagaaatgacaaatttaggagacatgcaaagttaattctttgggtatttgctactatcggtataagttcttcagttggtacagttttctgggtcaatagggtgatagcatattggaggaacaagaagaatgcccgagttacatcacattctgttgccaagaaccaattactgcaaaatggcactcgtgagttgtacatttcagatggcagcaaggataagaaaatagtggttacgccgactgagaaggatcaatatgaacacgataagtaccttttcaagaatttggaaagggatgttaaatcgcaattgttcaattctaaattccttcaacagttgaatgtgctttccacgatcttgataccgaaattcttgcataagaatagtttgatgctttcagcccagattttctttctaatattgcgcacatggttatcgttgatggtggctaggttggatggtcagattgtgagggatatcatctctggtcagccaagaaaatttgtgattgatatggcatgttggttcttcatagcgttccctgcttcttacacgaacagtgctatcaaatacatacaaagaaaattaagcttaaactttaggtctcgattgaccaggtacatccatgatatgtatcttgataagaggttggtattttataagacagcgttcgataacgaagctaccagttcaattattgcaaatatcgataattctatcactaacgatgtacaaaaattctgtgacgctatcacgaatgtatttgctaacgttgcaaaaccagttatcgaccttgtattcttttccatatatttaagggattcgttggggtcctttggtgtcatcggaatattcctgaactattttttgacaggatacgttttaaggaagtattctccacctttgggtaaattggtaagtttgagatcaagttccgaaggtgactactataactaccatttgaatatgatcaataacagtgaggaaattgccttttatcagggcacgagtgtggaaagaagtaaagtcaatacgctatatgacaaattgatggatcaaatgctacttgtcgatcggtcaaaggttgaatacaacatcattgaagattacattttgaaatatacctggtcagcatggggttatgtttttgcttctatcccaattgtacttcgtacatgggcttcagaggaaactagtgaatctgccaatatgaaagattttatcatgaacaaaagattaatgttatcgctagcagatgcaggaactaggttgatgcattctatcaaggatatctcacagttaacaggttataccaatagagtgtttgttttgttgaaagtcttacatagggtccatgactccaactttgactacgggatggtcagtagctttgatgaagcagaattgaatgcaacttctaccacggtggtttcgaacggcaaaactgctattagaggaactgtgcagcatgatttcaatggtatcagattcgaaaatattgacgtggttattccatctgctagagggattaacggtactactttggtgaagggtcttacctttcaaatcccagcagttattaatccagagccttcgtcatcaaagcaagtttcattagctaatgttagagatccattggatcaatcaaggtttatgatcaatcatggcatgggtagtagtttgttgattctcggaccaaacagttgtggtaagagctccattgaaaggattttgactgaaatttggccaatttataacaagaatgggttactttcaaccccaccaagtcacgatttattctgtgtacctcaacgtccatatttcattcagggaggtaccttcagagaccaaataatttatccaatgacttatgaacaattccatgaaaggggacataaagacacatatttggttcagatactacgcgaagttagattggactatttgttgaagagagatcggggtctaaattatttcgatgcaattgctgactggaaggatgttttaagtgggggagagaagcaaagaatgaacttcacaagaataatgttccacagaccaaggttcgttgttttagacgaagccactaacgctatcagtgttgatatggaagatcatctttttaccatgttgaagagatacagattcaacttcatatccatctctcaacgcccgtctttgataaaataccatgactacctattggaattgactaacggaactgattggagcctacaggcattagggtcagacgaagctattttatcaatcgaaaatgagattgaaaccctaaaccaaaagctaacaaaggtaaaagaatgggaaaggcagagagatgaactacaggcaaagttgacattggtgtgaaaaattggtttgaaaatttaaatctgccaagtcaaatgaactattcttggtgtgtagttcaatcagtagtaaaagtgtcggatattgtattcattactattatataatataatcacagagttaatgaatctattaatattttgctctatataaattatgcaagaaaagcacaggtacgtctgtgtattttattgtacaaatggtacggaatgatgtatagaaagaaaagagcaaattaatctatttgaagtccttgtaagtccatttctcagtgactcttggtttatatcttctaccttttctaatagggatacgagattctaccctaccagaactttgtaatgctctcacagtgtcatatagcagattaccttctggtcttaattttcttaatgaatctgatagttcatctgagaatttcacctctaaattgtcttccatgacggaatgtttagtaccaagcttatgcttcttgttctttttaacttttccggctgtagagaccggatttgggacggtggattccacttcctgctgaatttcctctaatttttcaagtttgagaaccttttccttcaatttctttaattcttgctgaagtttgactttttcttcgtgtcttctttgtttatttctctgatatttcgttttctttttattcttagttgctggattcagagacaacttagtctcttctccctcttctgaaaggtctttatcatcaagttctgattcattttcttcttctgaatcggagtcctcttcctccttatcttcaatagtatccatcaagtgttgaattcgttgtttatattgttctaaagctatcctgcgctgttcatttatcagctcaccctcatattcagtacttataagagcctcccattcttctttgcttggattatatgactttcctgcatgtggaatgacatctctttctttgacaatttctggcacgcgagcaatggaatccggcttaacagttgcgacggaccaactagttgtagactgttttaagaatccatttggaagtttctctacttcttctggtgctatcttaagcttcagtccagatggtactttaacctccttaccagcatcttcgccccataaatcaagggatcctgacttcacaagaccttcttttgcaactcttgctttcaacttactttcaccaatttttttaccagctaaagcaagtaatctgtccagttctttctttgataccccttggatcttatcatgtttcttgttagcagtctttgggttggttagagcaggcactttggatttagacttgatagactccaaaatctcggttgacttcagagttttcttgattgctttcctcttcactaatttctgctttaaaacttggtcaccctcagtatcaaccgcaaaaagcgcatcatcgctaagttctgtcaaattctgcttaccatgagtagtctcaaggatctgcttctcttcgagcttgcgttccacatcgcttatatcaatattctttctccatgccttcttacctttacgagaagattgtttgtactgagctggtctgtccttagatcccgccataactaactattttgtctgtttgtttgaggtggattgtcctgaatagtatggtaaggattagtaaaacgatacgccagtccccgagtattaattgtgtacttgaattcatctcatcgcatcgcatctcatctctttttttttttttcatcttattggcatcggattgtctaaatgaaaaattgacataaaaaaaaagaaatatgattattctccgggtaacattcactttcgaagcaaagtaaaggatatcgattcataatagacaaggagatagctgtcgaatgtcaattaggagaggaatagtctagaatcgtgtgatattgataagtaacatctgtaattgataaaataaatgattcttcaatcgaattatatgctatatatttgaacggatgtctgaaaaaatattactgtattgttagcctactccgtgtgggagcttccttcatgttctttcggcacctctacttctgtttctgtactttctattgttttaagctctgttggttcagattcaagcgctttttccttttgagcctcagcgtcagcatctggttcttcaacttcttcctcaagtttttgtttcttcgaaacagcttgttcttcttcattcccgtcagcctctggactatcgtgtcttctctttagtgaatcattatcttgatcatcaggcgaagttgttttatcattttttccattttccagagtttctctttgactttttatcttcgcttgaagtagatctttcctttcttgttccttgtctttgaaaaactgttcagcctcggcgacttgttcggaatgtttcttcttttttgactctattctttcggctagccgtcttttcttagattcgatatcattcctaatgagttcttcattggcgaaccccgccagagtagttttttcgctgaccttattaaactcaaacaagtatttcggcctcaaagatcttagattctgccattgttttactatgacattatcagtagtggtttcatcaccatcagttttttcagttttatccttgtattcggatattatagtgtcatatagttctgagggatcttgtctattgttttctgaatactttctcgctaaatctaagcctgattgcactttccatagaccgtctaatttcttattgccgagtttaatccatccgaatttcttgaatgcattattagctgttggtacggtaatcaaatcagaggaccaatgaatgtctttcaaatttgagaaatcaccgactttttgattgagtgcatccaattcattctgagctagatgattcaacaattcataaaattgacgatccctaatttcataaaatgaagaaattctgtttaacttcttcgttaagaaattgatagcagaatcgtttttatttagcacgttgtctccatattcaacacgccatttcgatgaatgggacaatgaactctgattaaagattttgccatagtagtgaaccaatgtatcattggaaataatttccttcaataagtaaaaagtcaaataaacttgcgatatgaccaatttcctgaaatagtcatattcatatgcttcaatccgatcctgaaaagatctaagatcaaataagtctaattctaacggtagcaattggatgatattttctgacttcgtagattctaaattgaattccttccagaactcaactttggatgggaaaattgaatttcttgagtcatctggttcatcgtaaacgttatcgataaagtttaaagggtagaaatctttaccattaaccgcagcttcttgtttagcatgcttttcattttttccttttatcaaattgtatagttcggtttcatagacaaagatctcatcaacaaatcgatgaacgacaggttcgagtgtgagtttgtcccttggatgagagaatagccaatgcaatggatgaaggaagaaatcatcacaaattttcgtccaatcagagagaatagtaggagatgaaggcaaagccggtaagtgtggagcccaaaacgtttcaggatattcatccgtaatttttgcccttcgattaatattgcaatggtcattaataggtattagctgcgatatccaccataataatttatgcacaagctcgaaatgattaggtgtgatgaagagagaatgagaatcgatgttcttgaaaaaagtatcaatgctgaagaaaagttttgcagctggaggccttattcccattttcaagtttgttcctccattagatacaggttccttcgataggccttctaagtaccatgacaatcttgatcttaggtacgtatagaattgccccagttcatgcgggaaggttaatgtcaggatacaagttgcagttaggtcaaagaataatgcggcccataccttagattcatcctcctccccaacgtactttaaatgataacaaaagtccagtaagacgcttagtttgcgcatgtctgtgtctccagcatttgtcaccaattcgtttaacagccctttcaatagtaactctcttttacctaatgatagttccgtatctaaagaaaaagagctggatagcacaccttcagaaatgttctcacgtttcaaaggttcagacagcacattttcagggattggtctttctgggtcttcatacaacttaatctgcaattgatccacaatttcggcaagtgagctctcgagatcttccatcttacttttaggttatcaatctgcttcaaccaattcttgaataatagctgttctctagaggaaaaacaagataataacgctagctcgattgactccacgaactataaggttttcctcccaaaatagttggaagaccacattgtagctatagctattcagtaggctttaccaatgtcaaaatttcataacagttgctgaaatttgtatatcacgtgaccaagtttttgaacgtgaaatgttagacctttaatattatcaggaactgggaatatgatgctttaagagacactggaatgttaaacgaccaacactgtactgtttcattgggttttttgcacagctgagccatacagaactaaccagaagtaccaattccttgcattatatattggacgttcgaaggacatgaataacaacgttgtgtttgggtgtggtctggtagactttcatcatactcgagggccagagatagaatattggtacgacggtggaacaacagcgttgaatgttaataatttatgggaatatttacccttccaggcccttccagatggtgcgcattcttacgaacagagttttacatattttaccttgctttatgatgaagtgaataaaaaatgttgttctagtgtgggagattccctaaaagatggtgaccaaagtggacgatatagtacgttttttgcgataagttgctccaaacaaattcagagtgatactttgataaagaaaccgaaagatgtcatacggtccactgttcagaagtcccttgtagtagtctgcaggaaaccaattttgggacagattaaagacaaattggcaataattaccaatgcgttgtttatgcaaagagatttcacagataagacgattatagacacattatattctaacttgaactcaattgagtatgatgatcatgatgaaagccatctttatgttgggttaaatttaagaaagaccgtgtatgatctacggaaggaagtattagttattttgaaagccatattgctagagaagaaggttttgttctatggaaatgacgtggaacaactttgtaacattcaatttgcgtttatcagtttaataccgtgtttgctcagtaatattcaagactgcggctctcctatgcttgacacatattctaaaaatatgaccatggtaaattcattcaaatcaagcgatagaggatctgtattacgatttttaggcttcccgttgcaaatattcacaaaaggaggatttttttctccgtatgtccctctacaacagatgaacgacttaacggcctcggtcacaaagtggtttgttgcaggaacttctaatacacttctcttggagcaaagcaaaaccctatgcgatcttcttgtcaatatagatgattccactgttcaaattatgaacaaaaaggataaagatttgcatcaagcattgcaattgagtcaaagtgataaaaaatggatggatgtcgtcatccaatctgtactgaagagttggaaccaagacgactactctacgttgagaaattcgcaatttgaaggaagcgaggactatattcgttggcaatttgaggactacctttcagggttagttctaacagtaaaattactggaattcacgaagaaatataaaaacaatgccgctctactcaaaactgtggacgatttagccactacggaacagactattaatcagtacaactctacttgggttcgtgattggcaacacacaaataattatagaatcttcaaacagtatactgatgatcgcttattcgatgttttcgacagcagacatccctatagaggatcggatgccatggcggttgtacagcaaaggttcaacaagatattctctcgaaaggagaagggagaggacaagagcagagaaaggcacccggaaggtgaaattgtcaataaaggaggcatgaaagaccacaaccgagggaattggttcaagaaaaaggaaaaaaaaggctatcaaaatgatggtcctgagagcattgcaacgactgatccgttgatcttatctaaagatgatactcaaccgaccgtggccgacattccaggtgagataacggaaaacccatggaggtagaaaccttggaacatttctcgtgtaacttttatttaaaggcaagtgaatatataaagtatttacaagcttctggttcaattcatttcttttggtcttgttactggggcttttaccagcctgctagctgtttttctgtaggcaaaactgtaaggggcacgtgaaatacgaaatcgtatccctccatgtctcttttggcatggtatagggtaccttttcggtcctcataggttttactcaatgatatttcagtgttttgctcagctaatggaatcatgacaaatttaaatgttagcatccatttaagttgaaatatgtttgttttaaattgactagtaatgtaagtcgtgggagagcattgaggaataagtttcatgcaaatcttatcgcaattatcgaaatttgtagcgtgagtttcgtagactaaagttcccgaaggcttcttctttgagatattttcatctgacgagaattttggattaatcaactcaaatgtttcgatggatgctgtcacagcagtcactttaaaattggaattatcttctacatttttcaagtcaagtattatatcgatttgatcggaaacagagtacgctggtttggagagttctaaattacaaatgaacttatcattcatttttacaacatactcagtttgtaatgactgcaactgcgatagtagcgaagaattgctttgcgtctcatcaatagagttctctgggatacctgtaaaataaaattgcgacaagttcattcggactgaggttgagggttctgtttcaaattgttggcctaataatgaatcaatgggtacgtcggaatcatcattttcattccattctgagactacgtctttaaacttttgtttcatggcttcaatcgaagttcctgaaggtttcccgatacttgacacgctctttcttcttatttctctatctaactggatggattggcctgttaatttcctgggttttgtagattttatagtactcccaacatcttgaacttttcccggtggtgtgatgagtacttctctatcaagtggcatctcatattggcatatactcttatcaacaaacggttgtacagaaatagggaagttgtaaaagtgttggtgagggatatcttctggagcattcaccgaaagtcccacctgtacgacatatgatatattgaaatgagcagagttcgtataagaaggcggaagatctttccctaattggtccgtcttgaacttgaataacctagtttcgcccggccctaaaatcaattcggagaataaaagcgtctgtggtataagtaagaatggcgcttttatccaatcaccggtatcgatggtctccgtagacatcaaaggggccaccttccgtgatatttcgtccatgctcgtatcgaagaaagatgaaatgacggtagacattggggaattttcatcagtacttgcgtttttggaaccaattcctaccaattgatgaacattggatcctgtgtttagcatatctgtatttattattgcctcatccatagaacactgtccgacgatttgcacgaagcaagacattagatccacgggattatggaactgcaatttcttcttcaaagcaaaaatttgttcctgcaaagcttcatctttatacttgtcttcttgctggaaagtattccataaagtcctcattaaccatggcttggactcgtcattattcagattggccaaaaacttatcccttttttcctcaaacacgacaagtttcttctctaaagattctttctgatgttgtgagcccaaatgctttaaccttatcaataaacatatcggttcgccagcgaaacaaggattagattcgtgaatgatttccagtcgaatattccctccaacaacagcacggtcccttctatgaagatgcattgaatccaaaattagcaagtctcgaacaagaaaaaagagcacaatcgccttctatgactattgaatatgttgaatcgtatgttactacttcagccccttttatcagtgtattctcaaacacataaactattttcatctctttcttacttctatacaatgtttatgattgacaaaatcagcatctgaacctttaaattttgatctcaaaactggtttgaaataagtacacagatttccatattaaaggcaaaagataaatgaaatagataaagaccaaaaaagtatattactttacctcttgagatgggtgttttttgttcccaccctgaaacccttcttaagtaacagccgattgtagaaggaacaaaatgtagttagtacagcgggttcctagaaatagaaaggtctaatctggaaaaaagtaaaaaaataatgatacgaaatcttccccgccaggactcgaacctggaatcttctggtttcagaagtagctaacatcgtagccagacgccgtgaccattgggccacgaggaataagaaaacgcaatgattaattcatgtaaattttggcctaagtaataatgatagtcacatggactgattcctgcctagaaatggtttgggaaaccaagtttagaacctcaagttttggaatcatcgtaatgcaaaccaattctcaaaaaccgaattttggtcttatacagcggttgaggttccaaggaaagcaccgcctacattcttttgaaatagtcagcctattagttagcctgaattggacagttatcctttaatacctcgtggtggtaggacttcattagcaacattgtggaaataaccaatacagaaatgttactaagtgagaatattaaggaattacttcaggagacaataaaacctgtacaattactcgagggaagcacgcctcctcagtatacctcgatgattataaccagtaaaggcagtattctatggtacgtgaacggaacaacgccagaaagctacaattcctctctaacaaaccttaaaatgatggccttgttgatcaaggataaatggtgcgaagaccaagatttaacggccactgatacaattcaccattttgaactggaagatctacatatagcactggcaagaatccctgatagtgaacttttgctagttcttattgctggaaatgagtttccaaacgggcttttgggactgaaattaaaatacgctttgccagcattccatgatttaaaaggatacaaactttcaagctaattgatactacaaggtgttattatactcacttcgcatagagaaaatagatgatgtactccatgtaacgatatatatatatctccagttattgaatgagatatgcatagatggtgctttaccctaatgaactgtgttacccggatactattcgaaataaattcgcgaaaattgacaaggcctttaaaattgtatggaaaatatgattgcctaaacattatatgctttatttaacgtgatgctattcgattggattttaaaagctaagtaggtcaagaccaggactgctgagcgctggcttattgaagcgtaacttcaagtggaatagccatttctggaagcacctttgaaagcgaagcgatctataggctcttccatcaaaaattctgcgaattgaatccgttcgcttgattcaccaatattattctgcatacaacatacctttttaattcacaaaaattattggcagaaagttgcaattataccaacgttcaggttttattatcaagttcaagctatcactttttggttgaccgagtgctaatcaggaattcgaaagcaactagcaatctacgcgcataaagcatcattcgatagcatctggaagatggcaaaaaatacacggtctcctttgaaggagagtaaccctaacaccatgggtaatcacatacataatccgaagaagcggtcacttgatttattagaattggaacagtcgaaccgacagaaacagagaacactgaggaccatagagggagccattgcacatgcaccaaacgcattactgaaaactgttcaaggcggaactacaaacacatttaatatcaatgctactggtgttaaatcaggagcacatgttggagttaatgaccctgtggcagcttctgtttctgcttcagtgtcagcgggcggttcaatgatgcgcaacagtaatgaacacggaataatcggcggtaacggatcgcctgcaattgctaacgctaaggcccagacgcagcgtttgagtaataaggaattgatagactggcagaataactggaagaagatcatgaaacgcgatacttttatatatttcgattgtcctgaggtagctaatgacaatcgtaaggatgtactgcgtcgagcattctctactttgggtgcgaaggtaaaacaattctttgatcatgaagtaacaattgtaataacctcgagaaagataacgaattactctcaattaccagatacagatatacttcaaagggctcataagcgcggatatatgaaaatatggaccttagagaaggccgctaggtttttgacgaatatggatgttgacttgaaagaaatggaacgcgacagtattagtgggaaaagcattccagcgtccaatttactgaatttattagaaagtgaaaagctctttggtagtaatgagagagatccaaaaactaaaagagacgatttgcattacttcaagcatccacacgtatacttgtacgatttagcacagataaatgcaccattgatcacattagaatggaaagctcaagatatcaataataagaagaaacatatatatccaaccatcaagcctggatcgtttggaagatgtccattccaaggagacgaaactgcagatgaattgcaaccacgcaggataatcaaacgatacaagagagataaagctaatgagtcgtatgctatgaagctaaggctcctataccagacaagtgcagaaccagccacattgtcctcttctgaaactagtgattatgaaggtgacgatgcaatattatcattccctgatccttcttcaaaagaacctatcatacttccgtaccagaacgtttacaataattctggagctcaatataataagttggtgaactcaatgtccagattcaaacagccaaaactaccaagaggggatacgtttgatgatgatgaattaccatatgggaatggtactggcaccataggtggaacaggtagttacaagaacaaatttcaacaggagattcgggccagtggtgtacaatcagttgatgccaacagtaatggcaacgctacagttggtaatggattagagcctgctaaggcctctaatttaaataaagatcttctctcattgaaaaaaatggttatcgaaagaaaatcactactcagtgccagtactacttccacttccgctaatactgtcggatccgttaattctggcaaacttcacaatcacaatattgcagcatctggtgtaaatcaaacaaatccgacttctacggtaagcaaacagcaactacccgcattaacaccacaacgtttacaccagccaattggtaggcaaactgctggatattgtgaaaattgtaaagtcaaatacgactctttagaagcgcatgttagcactgagaggcatatagcatttgcaagtaaggatgaacacttccaaggcgttgattctatgatacagtgcgttcagcaattcagagatattaattctgcataggctttacttcatttcaattcagttcatattcatattatatcggcaccgcttattaaatagtacaccacatacctacttcatatttttattgcatacaatcgaaaaatcgttaaataacgtctttccgtgactagaatttataactcggtttgaaatgaaactattcgacatctggtccatgggcagtagttaatactgtcactactaacacaacaggttccaaaaaattacctacccgtcccagctgtaacgtctagaaagtacaatcatgcacaggtatgtttaaaagaaaacgcatttctctgttaggcatgtttgaagacaaaaaatattcaccggataagatttctgacattcttcgtaaggtgggcagtatacaggcaatgccgaacacttttcctgttgttcgtttctatgcgaaaaagtcggatgattgagaaaaaatacttcaacaatcttagttaattagatttcggcgatgcttccttatgtggggtcatctggaagacacttgcaacagttcgagggtaaaaaagcggggtagctacgttgctctctaaacggaaattggggtcacaggatcatcagtgaacttaccgctaattaacaggctggaactgcgattacgtctacgatcgagagttgagactaaaaatgggctaagttccatttccgatgtatgcttagcggttctcactgcgtacttgctgaaaaggccgtagagaagacaaaacggaaaagagactgaaacagtgagacttcacagtcataaaataatcagagtgtcttaaggaataggacatgagaatcgcatcaagtgaatcaagaatcgtatgatttgaggtatagtttttatgcttgccttctttctgttccgaagccgccgttctaactgcaattcgaatcttgaaattatctttttcctattgtcatgcataatcttactttcataatttagaactcgaaaaagactttggttttagaatgtttattctacatcagttagataatagtgaaagcgtacaccttcctccaatcgcctaaacaaagggcactaaagctgtgatgtatattcgaatatttattttctagatatttgcttgagcgtagtctatatttgaatggaattattactacagaaaaaaaaaaaggtttataggaagaataagacgagttgaagcgaagagcttagttgaatagtcaagtctgtaatgatacgaaacggggaatggaaacggaaaaataaaagtttgagacagaaatgaagactaatccgtaaaaaaaaaaaatatagagctttcaaagcaaagcatccatcgagaaaagaataaagaatcgttaaaaacatcgagctgttgggcaaagaaattgtacatgataaaaagaattgaaagtgaaaggggaacgagaaggataacaacaaaagataatagtagaatgcaaataaccggtaacagctcaaaagctctttggtgatcttgttctagattttgcttttacctttggggttttaagatgcaatttataatgccttaacatattagatttagcgttgaattgtttataacagtttggataaagacatttgtaaggtttgtcccctgtatgaatgttcatatgcgtgcttaaagagcttggtcttgcaaaagccttaccacattctgcacatctatacttggaattagcagttgaatttgaagtggatgtaagcgatgacacagaggacgatgacgaggaacgcatcgaggcaccatagtggttgttttgttcatgaatagaagggcacgtcgataacgactgtttcatgccttgaggtgctgtatcttccagcatagggaatattgagggggaagcaatattgaaggctccttcaaaacttgacatggagttagctctttcagcaaactccgagtccatttcggattcagtgacagagtctgaaacagagccggccaccgattctgtcactgaattaccgctccttgcatttacatttgtcgtatgagtgcgtttaggtggatgacatagttgaatgttagtaccgacttgttgaagctcgctactttgcgacggacgctgagatgaaggctgcggtatgttctgagggtaatgttggttaagaggataggcaatgtgattggtttgccatacgtttccaaattggttttcgtagtttgggtcccatagggacgcagcgacagattcgtcactgttatgatcggtgccagcacctacacatgtatccgtatgattgtgatgatgattgtggtaatgattgtggttattttgatgatgatgatgatattgagatttatcatcataaggcatatcaggcccgccatcatcggggacccaggcaggcgcagagaatactgacgcaaaagtagagaagtgaaatttcaaagacggtttggtcagtttatacatctccagtgccggattcgtcgagggaagactcgattcgttcatcatcgatgcaaatacatctagaggtacggaatccctccgcatcagtttcttttcgtgactattatcgttgtaattatactttgtttttgcatcacctaagttgtatgtcatcataggttttccaatatgaaaggaagaacagtgcaagaatataaacagaaagatgatcgcttagtttgtacgatggtgtcttggaaagaaaagagatgttgatcttatgggtatcaaatcgagaataaataaaccttttccttatattattgttggcaattgcggatataagcgtttgtaacagagactttaattgattaaaacaccatcaacactatcatatgtcaaatggaagctaatgggttaaatcaaagccaagcaaattaggttgacaaagtatcgttaagataatataaagcttgacagataacttgatcagaggtcagactgttcagtactaattcggtctttgttaatctagctcatcgacttttaatattttcatacatatatataaaaatatacgtatgctatatataataacaaagtaacaagcaaaaccccaagcccaaacccacggacaggaatagggcccttacttcgtgcagaaggaacggaaaacttaaaaagattcatagttgaatatataacaaattgaaatctgtattccagacatggaatctgcgtaatgtctgagatcgctcgcagtctgcagaaagccagaattgaaaattggtattaagcaaaaagaaatatagtgaaagtaccggtggagaacgaaaagaagctaaggtagagaagtagaagtagctaaacaagatagtcgaaagctctgacaaaacgatgatgatgggtcagaaacggagacgtctaggaaaagatgagattcggccggtaattgctcaagcttgggacgttacctcatccagacagaagagagaaaggcattagcacggtctcttggtgatattttcagaaaaaaaatccgccgctagaatatactgcctactagatcgagcatgagaaatgaaacacatttagaagaagaagaacaagaaaaggaagtaaattaaattctagatggacgacgggttcgaatggaccggacagtgggtaagtatgtcaggcagcgtggcagcagtcagtacgggataaattatgataccgaagaatgtactgtgtagtaacaactgggcaggaggaataataacaagggaaaaaaattaggaaaacagagaaagaaaatccgctggctggcttacatgcccaggatgaaggttggcctgctgtaatattactttagtttatgtcacgttacgccatggccaattgacctgcgacaatgtcaatacagataaggagtgtttacccttaacgtgaagtctttcatgtgcctgttcttttcacagtaatcaaaagactgagatgtcttgatttagatagcagtgaagagcggatcgacatagcgcattagatagcatttgggagatcagttgaagttgcaatcgatcagatagaaatccagtttcctttaaatcccacagtcaattccaaccctagatttttcagtagtgcagagtcatctaatgaaacctttctttctttctttctttctacgtttccgcttccattcgtagctcaccttggatctcattcaatcctccagatttcaattctgctagtaagtaaacagagaagtaattttaaacggtacaagtactctatcaagacgcttccatcatgcttggccgagttatccgcagatgaagaaagagtaaagaaaagagaaacgatcgtagaaatactgctcgaaagtgagagctgcggatgtttattgtttattggcggtttcgcgagcttttctaacacagtcaagggaatgcggaggaatgggaaaatagggaaaaacatctgatcttttcttggaacattctttcacttgaaaaacacactggcccgttgtgttgttgcatgttattgaggtaaattacagaaggaaactaaaacacaaaatgaaggtttcgaatctacaaagaaagctcgtagagacaaaagtacgggcatttctagaagcacagaaaaagaagtatacggttcgacgtactgttcttttttgtggaagatgcaattattcatttccattgacgatttgtctctaagagattacacatatacagttgtgcagaggatacaaacacgtggaaaatggtgacctcttttgtttagtttttgagaaatactgcagtaggaactctaaagacaaacgggtggggagtgggggggagggggagggaacagtgataaaaaagggcgaacaactgttagatttggttgtcggagttctagtttcgttcgttaaaaatccatgtaaaaggcaaacgagttgcctattgaatcaatgcacaatttcaaaagcccaaaagaaaaaaatgaatcactattctgtaaagagaaaacaaaacgaatctttgcgagataggaagaaaatatagaaggaaagaattcaagaaatcgtcgtagaatctatcgtgtggaaaaaagttggaatctacgtctccattttccaccgctgttgctgtctttgctaaggtaacaacagccagggaatattgtttctgaaacaataatggtgttattttttgtgtcaattggcaatcgtaatctagaacctgaaagatcgcattacgcagtggcaattataatggactcgatgccgtaggttcacaccatttgaagctcatcgtttcggcgaagattggggtgttctcccttaaatgaaggctaatctcagaaagaaggtaactgttccgaaacagccatcaacaaaaaaaagaaaaaaaacaacaacaataaattgttcaatttctaccacacgaatgtcttgacgtgtctcttcatattcggcataatcctgtttcggtatgtcccgttggttcctgtagttttctactgccaaatttcgttcgagggatattctaaatttttttctttctcgacgctccgctgtttatgagcacaggaaaaaatactatctgaaagaaaaacagatgcaatacccggactttagccatcatcacatttacctgcatagcacgtagacgcgtaaacgttggcttgtctatggataataaaaaaacaaaaaactttaagcgtagtaatcaacgggtattggacgttgcatcatatgattttcctattgcagcaacggtacgtgtatattcttatgcatactatgatgcaatgtatggtaataacatcgttacctcttttcgaagtttaccattccttctcgatgattcatttattactaagtgataattgctcattaccgcgcagataagttccacatacgaaaaatatgaagcgggtttaaaaaagaaggtaaatccaagaaaaagaaaaagaagatggaacagttatatgagattctactaaatgtaccttagttgctatcgttatgctagacgctttggaaccgaaatcaagaaccatgggaaagaagtagaccatagacacttacggagtgtactcacatgtttagcaattaactaatttttttctggaaccgttgtccacattcgtgcgcaacttgcagttgcatttaaaaattcttcattcattccggcaaatttcaggcaacaattaaactttagtatgattaacgttatcgtaactgtttgctcataatcgaaacaattgattaatgatctgctgccctaagaaggaatgcatctccgatagtactttctatcgctaattaatgatgcggattttaggtatgattattttaccgaatgtcttacttcagggtgataacactaccctatacacgtttttttgtttacatgtgccctttgtcgtttgtttatctacgagtttgtttgcttctgttcgagctttgtcgcatagattgcaaatataaaacttttgtcaagttataagtgggagcccaaacggcaattatgtggcattacccgaacatctcctggcaataagtacaatcattcattcattaatcaaacagggtaagttgttttcttgtgcactctaaaatttttggtttttgctgcgagcttatgctgggttcattaaattaaggtttttcaatttttttttttttttaaattttgatcgctcgaatgttgctgaacttttaaattcatggaagcgtgccactcaaagcttcgtggaatggtcgagagtgaacattggtttttgtaatgctgcactccaattattgaatcgatctatcccttccatgttcgtgttggttcctgatatggttgaattcttttgtattgtacctggcatcacagtgattgtttactttccgcgattgtttcctagtaactagtacctgacaattacctgatttggaaatgatatgagaaaagccgttaccttaaattatatgttggttttccagcattcaataatggtccggttttctctataatgaagcaatgcttgtgcttggtgcatgaaattgatattgatattaccaactccaaactttaaagtggtacctgatttttatacgtatggtaggatgataatactacccagcggtaataatgactattaacatatgcagaaatgatcaggaaactagcatgatatttgttgttcagtaaacgatgctgtgacatctgtaacctatcaagcgagtaagttgcatataaaaaggcttcatgatgtgataccttcaggacctggtgctaggtatgtttcatgtcacataactttattatttgaagctttttgttttagtattcttgtcctctccccaatcaacagataccaatacatacacaaatcttctacctcagcctctagtatcctgaaattatcatgcttcatcagttttgggttttggcagctgcctttacactatcgtcatcagcatttgctgatgactatgaatcatccactacgcgaactttattccccaccaatatcagcggtattgatccaattgctaaacaaagagatgttttgtatactgaaccagaggaaaacaccatcactgttggcgaagtttaccaaaatgtggctgctgtttctgtagcctcttccacgaaacccacccgtgtttctgctactagcgttcaggtgacttcacttggtacttccaccgtaataattgacctgtcaaaagaggcaactagtgtttacgaagtttccccatcgcaagagtctgctatcgtttcaagcgtcactcagcccgaagagtcaaccattgtttctgatgtttctgatgtttctgaagacgcgacatacttttcatctaccagcaacaacgttacttcacaaataccggttactgaaaaatatacggaaacaaaacctacgtccacatctgtgatcttttctacttcaaccacagctgatccttctgtaaccaaaggtacaacacttactaccattgagtcgaaatctcaacctctagttactcaatctatggtctcatcggagcaaacagtaacccttgaaaccagcactctatcatcggaccaaactttcagtcctacgggaatcactaccacagaaacaacctctctctccacctacacatcgactgttacttctacttttgtttccagctcgtattcaatggtgtcctctttctatggaaatacaacgatgctttcttacacagctattccagttaactacacgacaacgcaaaaattcacctccacgtcagttacccaagttccaactgcggttctaaccgattcttctacaatcgtcgaccttttcgccgcagttgccacaagtgagccattatcggttttcgcccgtgtggaaaacccattggatctggcagctggtgttgataacggtggcttaccttatgaaaccaacaagttctacggtaacttcatcgtgggaactcaagaatcaagtgtctttgtttacccatatgttcttttcaagacttccctaggtattgctattcagcacaccagcgcttctcaatatagctttactgacagaaactctttaattaacccattgaacatcgcctctttcgttgtttctagcgcagaattccagtctgattctggtgacatgaactttaaagtgagtgatatgtaccacggcagttgtaatgtcaagttagtatcctccgaagatgcctccaactacatcgaaactcctcttgttcaaggtatggggttcgttacttctgtattccatggtgatttgaccccatacctgacatcggctgtgggtatctccactttgacccaggaaacttctgacaatttggctagtggcattttgaaataccgcgtaacactattgaatggtgtcgattggttaatctatgttactgttccagattccatttcttctgatgaacttacattaagtattgaaaatggtaacattgccttcagcacaaatgacggtagctcaattgatggtctaattgttcaaattgccgaggctccatctgcttcagactcagaaacatactacgactctgcagctggtatgtacttcaccagtatggaattagcaggtacaagtgatggtaataccgctggctacaaatttgtgtatggcaccgaaggtaaatccattagtggcgctacgatgctatttaccttgccacatcatctaaactctttaactgaaactactatggctgctaacactggtattcagctcgactccaccaccaagggtaaaatgacaggatttttgactacctccctagagttccaaactcaattgaatgctaatgtcaactggctaccatggtcagaacaaaagggcgatgatcaattggtctacacaagtgaacagctacaattattggcaaaggtcgctaatgaagagttacaggttagcattaaagattctattcagggcttaaacacatattacatcggtaaagtcttggacaaatatgctttcatcttgttgactttgagtgatattattcaagatgaaactgtaacattggaaaccttgacctcaatgaaggaggcgttcgcgttacttgttgctaatcaacaattgtacccattggactacgacaccaaatatggtggtatcatctccagtggagatttaggatctactgaaacacagtatgacttcggtaatacatattacaatgatcatcatttccattatggttatatcatccatgcagcagcagtggttgctcatgtggacaaaaaatatgccgctggtgactgggttgaagcaaataaggactgggtttcagctttgattcgtgatgtttgcaatccatctttagatgactcatacttcccacaatttagaatgttcgactggttccacggccactcatgggccgcaggtttgtttgaaaatggtaacggtaaaaacgaagaatcttcaagtgaagattatcatttcgcttatggtatgaaattatggggtgaagttaccgaaaacgattccatgaacagattaggttctctgatgttgaacgtgctaagagacagtatgcaggactactttttatacgaggactctaacactgtcgaaccaggccaaactgtttctaacaaggttagtggtatcttattcgacaacatcatcgattacaccacctatttcggcttgaacacagagtacatccatgggattcaaatgttgccattgactgcagcctccggactgattagatcaacaaaattcgtacaacaagagtgggaacagaaattaggacccatcattgatagcgtacaatccggatggacaggtatactaaggttgaatcaagcattgtatgacgctgctacatcatatgagtttttcgctcaagacgatttccaaacgtcattataccttgataacggtatgagtaggacttgggcattggcattcgcaggcggattacaataaaaaaatatcaaccacaatacgatttcccactaacacaaaggtggaccctatgtttctcatctttttcatgaattttcaacgctttaattttcttcatagtttgttaggtatatgccctttatagatcaaatattgtaatactactatcaataacacaagtcaaaagaaaagcttagacagcagaacgtactacttccagctattagatggatctacaaatgacgaattggtgacaataatagataaaaaaaaacaaaaaaacaatgatcagctgaatacaaacatactgttaccaaaagataaattgcaatagttgttgccttcgcagtctattgcctgtgtgacactctctgccacatgtgataagcacaataattcctctttttctttttctggtacacctgttaatttgagaaaaaatacgcatgatgatgcgcgatgcagattcggataaacttgaaaaaaaaagaaaatgccctccagaaattgacccagtgtgtatcatgtccctgcatgtatgtacttctaaagaatcatgccgtagttctttcttgtttttttcttatgttttttttatcgtgagaaatattgaaatgtcccccttctatcaacttatagaacgctatatttcagcagttgccgtggttgtgctgttctcaattcaaggctcgaggcgttttggagcggaaagtttttgcattttcgttgcccttttcaaaaagagggcctacgcatcatggaaaatcacaggcaacatatatcctactattaactgagtaaacagacgtaccaatcagtccggaaaagctagtccgtattatctacaaggttcttttcccagcacctacctttagccatgtcaacgccagcaaataggggaaaaacatataaccctctcttaaaaaaataccattcgagtgcttttccgtattcaaacagccaggcccctaaaaccgaagaaaacagacgaaataaaaaaaaaaaataatcaaatatatagaaaaagttgtgtccctccatttatagtctagtaatctcgtggaggatctaattcgggtgccgtgactgtcagtttctatctccacccaaaactcctggatacatttaggcgaggttattagccctggtgctgagacgcggatttctgattctgattctgattctgacttctcaaccttttccgtcaggcgttacaaaaaaagggtacgcaaatgcactgcggcgcaacgtcttccccattccgcttttattccaaccattaacaaggcaacaagaatagtatgatttctttttcaactacaaaaaccaaaaagctttcttctatcggtttttgcgcagaaagcccgtagcatatttcccacctcgcccctcagggccaagggatccataggatccacatagcatctaagtagctgcggaatgccagtcttttcggctcaaagaccccactgaataaagaacggaaataaaaatccaaagaacggaatagaacagtttttttctctcccttacaaggacacaaaaacgaaagcttctcacagaataaagcgcagagcaatattacaatcgcgtcagaatcgaaaataaaaaaaaccggcttcataaatcctatgcgcattcaaaacgacaatagctaggtggtttctttttttaacttaggtgttcagtatttccgttttgcataattctatgccatggttacgatccttttttcctagtgcaggcagtagcttgcagatattctattttggtttgcttttggatcataaatctgttgattacattatatacatgcagacttgtggtggttgtacattccattacttcgcagattattcctctttatttacttattccctctagcatgtcttttttttttcctggtttttttctacgtttttgttctcggccatttcccggtaactatcgttgcctctggctcctttgtcatgaattcagatttgttcatcaaccttatcttgggttcttgtgtgcactttcgttttattgtaattttgttttttatttcactaatttccctttgctctatgttcttcttgcagttctcaatttcatttcttctttctacttgtacctatctcgttaccattcagtgggaaacgaactctcaaactaagtactcatctaaggtacggtcaaactatacagatagtgatatcgattgctccagagtgtgcatcctttccttcccttgtttcgtgctataaactagaagaaattagtgagaccaaaaaccaaaaaatcaaaacaagaaccaaagaatacgtacattattaccttactaattccaagattcaaatcgcagaggctgtgaattttttgtactgctattttctcttcacactttgtattcctgattctgcgtttcgtcattatagtttaactcacaaccagtgtgtgttttattttcggtttcccattctttccgttctgaaatttcggtttgcatttattcaacttctgaatagagaaagtatttgcataccctataatcgaacttgagtcagttttaagttcacgaactacagaagaaaaaagattaaagtaacttcggcactccaattgcgctttgtacatctgcaacttttgatacggcctgaaacactaatctgagctgtcctttttttttttttttttctttcctttatgtccgcgatgcatactccgttgaataccactttagatcaggttgggttactatgcggtaggaccgctacctcgatggggttaatccatattgcttatgatactctttccaggctcttgcaaaggaatcctcaaaatggaacttgtcttttactactctgtgagaactattggaaacaaaaccaacaacaacaggagtcaaatcatgctatagtaatagatctgttgaccaaatcgttacagcatgattcggctacttcgccgttggttcgttcgagtaatatcaatgataacaatggtgatgccagtaataacactaataatggtaacaatattaacaataacaataataatagtaataacagtaacaataataacactaatagcattagtaccaatattaagggaaaaagtgacaacgataactcattagcaaggcagggacccggatctttatcctccaattatttgatttggacttatttggcaattgcatgtcttcacaccaatcagatcagcctagctttgaaaagcatcactcaggctacttcgttaaatccagatgaaccatttctttggactttacagacaagaatcatttcaaggtggtatttcctgttagccttggatccacaaattcaacagcaacaaggggcgttgcccactatagaaactttgctaccttattacatcaacagcatcgaatggtctactgtgaaacgggatcctctcatgcaattggaatcgcatatctcgttagctaccttatatttccagttctctctcttcgagcaatcccttggtgagatgtcgtttgctctaaacttattggattcaattcaaacttcgatatctttaaatgaaaaccttgctaagttgacatttatttacaatttcatcgctatcttgcaccaacgcttaaatgacccagataacgcgttgcagtttttgcaccaggtgaaggatttagcgccaactgaatctcatgtcatcagatgttgtatcactatgtccggaatatcacttctatcgaataatgatctgaaaattgagaactcaatctcattgttaactacggaattaaacaccttaaccaagttgaaatcaacaaaggacgcatactattcaatcacatctaatgaggaattcatgttgaggtatatgctagccagatgtcactctcatatgaatgacacgggaactagctattaccagttccaacaactattgaagcttttcattaaccatgactattcgcctttagtttggacttctatcgcttcgttgtatctacaactggatcaattagccgattctttacaagcatactcacaagctgtacagatggcaatggataaattgaatgatccagcaattgtaacatctacttccaatttttcaaacgtttatctctctttcaagttttacaaattgtttgctgcttacggttggttcggtatttcccaagtatattccaagacagatcagataaaagattctttgaatgccttggaacaaagtatagagctattcagatcagttggtgactttggtaccgctcaacaattgaagcaatactatgagcaagttagccaaactgcttccactatgaagaaccaaaccggaacagaccaatttctacctccagatattcctattgatctattattagacttttcagtgtatcattacatgcaatcagcattcattgtagaatctttagattctcctgcccttaacgctagaatcccaggcgttgacttgcaagtacagcctacacagtcattatcacagcaaccgcaacagttccaacaaccacagcatatgcagcaacaattaagccaggtaccactgtccgcatctcctccccagatatcaacgctacaacaacagcaaccgacacttcaacaagcaggtatgtctcagaacacatcaccagcactgccagtagtgatggttacccaaaatccaaacacacctatagaacataacattggtatgactgcagttcctcaacatatggtacaacctatcccatctcatgtccatcctcatcatgcgcagtcaatgggagtttacacactgccttacgttgttcaaaatgcagctgcatttcccgcgcagccagccgctggcggaccacctcctatgtcgttgggatatattcaacagcaacctcaaattgctcaaactcatgtatctcagtctagatttggataaactgtgaaaattataattaccaggcttttaataatttaacggtatgtaacagcttgtattaaacacacacattatcctaatgaaatgtatgtattaaaatttagccgattcatcacgtatgaaacaatcctgtaatgattattatttattatgatacacaaattaatggatttcagtgttctttttagattagttatcaatttataattcaagatatttgtgaatagttaccatcccactttctctatttgatacgatgaaagtttcaggtaagaattgtaaaagctcgttgtacgcagggattttttgtaccacctgcccattaacaatagtttcgtcaaattcaccccagtagcaatcaatggaaactccaagtgtgtctgaacttccctcagcagtatactgaggtatccacttcaattgaacatcataatatggaacattccaactgagtttgtgtaaaagcaaagaatctattccctcatcggttctgtaggaatgggttgtggtttcattgccgactttgaattcgacctgctttagatgtttcttccctgttgtattgaatttcatcaaacataatctgttgtctgcaacattgatccgtagatcagcaaaatatggttcatattcaaagtgctctttatcattatgagtgtttttaactacatctaccttcatgggaataccaaagttcggccacatgccttcatatacacacagttctgttcctgaccctgagtctttgcaagacacatttggtctggacggtaaagatgatagaacttcttgaatattagctccagctcgaccgtatatttcaacattttgttttgtttctcttgagatatctatccgttgaacaaatctgagcttaagaggggcaagctcagtatatggagcagcaaataatgaaaatgaagccgccaaaattgttacaactcccaaaataatcactacaaatcgatttaatttggtggtgaaggggagtagtggtgagcataagaatattgctccgtaaatagcaaacttgaagacagcttcagttgctttgttcgactcttggacggtcatagacaaagcgtcaaacagattgaatagactttcccatattaaaaacgcattgattggaacagccaaaagatactgagctgaccagtcataattcaacgttctttgtagatattggacagcaccaggtaggctttttgatgaagcaataggacttgattgaactgatgagcttggagtattaatgagaggagatgtctcagttgtttcggaatcttctggctgtcgtggacattctattgaatgggtatcgtttgtgtctggacgcataaactcagagttgtcataatcatttgtcgcattgggccttttaccaaagcacatggaacagagtccaaacatggaagcaagagaaataaatagatagaaaacggttactggataaactcctgtagctttaaatcccgaactgctcaaatcccatgtacacttcagcaaaaataaccacgctattgcagacaattcgagaagagataatgttttgaaatcctgaattggccataggtattcaaataaggctaaaactaaggtattaataagcagaaactctgaaatgcagaataagaatggaagtatgaaatttcttgaccatatagtgggattcaattgaagtagcaattccttcgtaaaataaatggtgaaagaagacacaaacagtgcaaatggaattctagtaaataaagcagaagttggcattctccatgttcctagtttattgcaaactattcttaatagaataagtgtaatgggtaaaacgcagagcaaaactatattccacacgtaaagctgtctagcagatacaacgaaaaaccatttgctaataatgtcaaagtagatagcaggggatgaattactttcatcatcgagaatctcctgtgaagcggtggtttgatctgctaccacatattttgacaactgccaagcaatgttaagcatatgccatagtgcagctttactagtgtgctgaactgtatccttccccgtatgatacatatctctaggcttgtagaaggcaatgtcccatcctcgtagaccgttgagttcgtaaatcttataatctgtttcgctggaaacaaacctgctataaaacccttgttgatagatggaattgccgaagggctgatcttttacggatttttcatataagagtgcggtagctgtatccgatgtcctgaacaatgcagccttggaaccggcaccagcaccttctagattaataacatatgatacaagtttgaaccactcactataagtgaatatggtggctcccaataacccaaattcttcattattgttgaagttgaaaacgatggttctttctggttggttttccgagtaatactgaagtaacgcaagaagtgataccacacctttcccatcatctgtggcaccatatccagttggcaccgagtcaaaatgggcggatagtagaaggccaggtaactgtggtgactttccttccactttaaccaaaatgttcgaggactcgtagtaaaccagcctggtttcggtagatgaatcgttgaaaacgtccaaatgttgaaagagtttagagacaccattagcagaatcatcagatacctcaataaactttgactttttcgatatctgctcgactctttgcaacaaatagtcatgtacattatcattgaaatgagaagtgtaaggatgaggtttctcggtaatgacttgtaaatcatgccaagctgcatctaacaatgaatttgatgacttatcatctggtaagtttgacttatatttattagcatcgaaccatgtcagtatactaataaccaaaacagtaagcacaaacaaggtgctaacggtggtcttcctaaacttgaaagtagaccgaaaataattggccatcattatagttggaccagggaaagaaagagcagccctgaacgatcacccgctaatttctaagaaattgtaggtgcttgtcaaacacttattaataaaacgaatggaataatacctctctttatcagttctattgatttattgtgactgaaaacccttaagtctgttttggttttaattgtacatatttcgattatactcatcttctcgaatgataactagataaagaaaacgtacatatacacagagaaaagggcattgacgaagctttgcagcctttaaaagtctccaataacagagtattcattaatcataggtatgtgcgtcttctactcttgtctatcctgtagctcatccttattccttctcgagcatgtattggcgtcttatttgaagaactcacgtgccgagaaagaaattatgttaccctgaaaatagatactggagaggaaaacatcaaacccgtgcatggtgataacagatgtgccatgcaaatttcctcgagaccttttggggacaatagttcatgcatatacgacctgcatggacgttcttaataacaacgattatctgtaccattgaaatttgctcttctacattcaggtcttagtagttttcttttcggttaagagtgcaggtttactgaaaagtgaaaccatacaaagactcgtcgtcaagatgcaagtacagaatgttgatcgctccaagttcgctccaatgaagaatgatttgatgctcagagcagctttaggtgagaaggttgaaagaccaccatgttggattatgagacaggctggacgttatttaccagaataccatgaggtgaagaatggtcgtgactttttcgagacatgtcgtgatgcagaaattgcttcagaaattactattcagcccgtgagacgttacgccggtttattggatgcagctattatcttcagtgatattcttgtgatccctcaggccatgggtatgaaagttgagatggttgaggggaaaggccctcatttcccggaaccgttgagaactgaagagcaactacaaaaggtattggattataaggtcaacgttttagacgaactagaatgggcctttaaagctatcactatgactcgtactaaattggacggccaagtgcctttgttaggtttctgtggtgctccatggacgttattggtttatatgaccgagggtggtggatcgcgtttattcagattcgctaagcaatggttaaacgaatcgccagaatcatcgcataaattattacagaagattactgacgttgcggtcgaattcttgtgccaacaggtagttgctggttgtcagatgcttcaagtgtttgaaagttggggtggcgagttaggctctcgtgatttcgacgagttctctttaccgtacctaaagcaaattgcggaaagagttccaccaaggttaaagcagctgggtatcgaagaacgtgttccaatggtagtattcgccaagggatcatggtacgcactagacaaactatgtgacagtggctataatgcagtttctttagattggtcatgggaccctgcagaggcagtaaagatcaacagtgaccgtgttaccttacagggtaatttggaccctggtgtaatttacggttcggatgagattattaccaagagagtcactgaaatggttcatggtttcggcggaggtaagcaacattacattgtaaactttggacatggtacccatccattcatggatccagagaagatcaaattctttttgcaggaatgtcacagagtcggtagtcaataaatctatcaaaaatcggaaatagactactacctttctgcatccaatttatttcatgtatataccatttcattctgtttaatacatactgatgtcagtaaatccatttttttaccctgcttagttgatcaagtctggtcatgtatggttttttacttcaatgtactttatttatagtgaaaccttgatatttcaaagtttgttacttcaataaatcttcttcattcatgaaaacttgccatcacacagtgaaacgttttaaaagaggtgttaaagagctcaaagaagtgtggattccctgaactgatgtccgacagaatacaaaagaatgacttgtacgtctatgatttgtctgatgagatcctttcttctttgcagttgatatctttcgactctgatatgaatgaggttaaagtggtccattctgatgtagaaatcgaaaacaaaaaggaaattgaggttaaaacagtaccttcatgtgcttcatgtggtattaatgcatttcctaatgataattctgatcctcgatatcattttaaaactgatttacacaaattcaacataaaaagaagagtttacggtttatctccagtcgatgagcaagagtttaggcagttgattaaaagtaaagaaacagccactgcagaagattctgacagtgattctttatctggtgaggatgatgagacagatgaaatagaagaagatgatatttctacaagaggaggagagcagttgacagcaattctcgagcatgaactccaggatttgatgatcaatgacaaccaaacgggacccgtttctcatttaaacacacaatctcctttaatattcatgcattctgctgaattatcgggaccaagaattttcggggcttataaagtactatttaatgcagaggaattgaaatgcccattgaaatcaattcatcattggaaaaatcaggataaaaccgagcatttctctgtgttgttcatgattggcggcggtcattttgcaggagcagtggtatcgcatcaaaagataccaactaatggtaataacaaaaataaatatatcctatctctacaagagcagtcagtacagtttttggaacagaaaacgttccatcgatacactaccagaagaaagcaaggtggctcccaatcagcaaatgacaatgccaagggaaaggcaaattccgctggttcaactctacgtagatataatgaagcagcgttgaaagcagacatacaagcattgttaaaggattgggaaccctacattgcaaagtgtgacaatattttcattagagccaatagtgtcacagatagaaagatcttcttagataatacttgcatctctaaaactgatgtcaaactaaagtctttcccattcactacgatgcgcccatcctcaaatgaactaaggcgtgcctgggttcaattgacgtatttatcgataacggacaaacctcaaccaaaagtcaaaaaattgcaaactgatcattcaaagaacaaacctaggaaacttacaaattctccaacaccagtgcctctgaagacagaagatgaacaacataccgaaaagctaatctcatttattcaaaagagtaaggcgccgctgttaatatcgtatatcaagaaaaacaatcttgatgtcaatattactttgcaaccctcttctgaatatcatcacacaccaacaatgctacattatgcatcatctcacggcttgaaacacatggtattggtgttgttgtccactttaaaagcagatcctacaattactaacaatgttggaaaaacagcgtgggatctggcgagtgacaccatggtcaaggaaaccttccagttggcgcgttataatttaggagaaagcttcacggattgggagcaaagtcatgttagtggagcattatcggctgaacagatagatgaaaggcacaagaagatagcactcgaagaagagaaagaaaagaaagacttgatagaaaaagaattgcaggcggcaaaggaaagaatcaaagaggaaaaagatgctaaaagaggtcccggaatgaaacttggcgccgcatcctctaacgttcaaataaatttgaactctttaactgatgatcaacggatgagattgatgagagagcagcgagctcgtgcagctgaagcgagaatgaaaagattttctggtaactagatgcaagtataaatagtaacatatataacttttacacggagtcttttaccaaagcataagtgatgtactgtcgtgcatcatcaaagacgttattcatagcttcgtcaattaagtcattagtcttttgtggatcaatatgtttgtatcccaataggcattttctcatgatttctgactttgttccatttcgaagtatctcctccttctctataattttttgggcttctagagcattgatccaaattgaagcaggaggattgtttgatggagtcgcagcagcctggtattctggctgggcgttggcttcatcagtacccgttatctcttcttcttcaagcacttctacttcaccagaacaattacaaattaagtcgtgggtattggataaagtggacaaattaatggtaaacaagtccttcaactcttcctgctgaaaaagatcatcatcattttttgattgatctgtggcactgtccaagaactttttagaaagcgctattttcattaactgtctttgaagtatcttctcatcaatacatccggttgtcacaagtctataaatgaaacatggccttctctgaccatcgcgatgaattcttgacatggcctgtaaatcaatggatgggttccaatcattatcgaataatacaagtcttgatgcaccgattaagtttagtcccacaccgcctgacttcgcacttaaaaggaaaacaaaaatagatggatcattattgaaggatgtcacaatctgatcacgggttttggttgctgtacttccatctaatcgtgcagaagtgtacccttctgaactacaatgtccctcaatgatgtctagggtttgcgtgtaatttgaaatcactactactttctcgtcagtcttggttttcaactcatgtaataatgaaagaagtattctaagtttccccgaggtgaattttccagaggtactagaagtctgaacttgactaagcctttcttcatagtatggatctgttttgatcaagcgggtggaattgcagatttttttgaatagagtaatcaaccccaatgaagagttgaatgtcatgttgctgaaatttagctgcccttcggttaaaatcttgtgaaaagcctctacttgttcagcggtaggtttgcaaaatataatgagatcagttctcggtggtaaatattgttgtaaaatttcattggttcttcttaagataaaccgtttcgttatctcaattaattgatcggatctcagaagtccttgttctaccagagtttgattttgtttagcattgacatccctggatctggcgataggtaaaatatattcccttttaaaccttccgaaagatcctaaaatcccaggattgataaaatcaattattgtatagaactcttcaagatcattttgaataggtgtcccactcaatacaattttcttctcaatatctaatgattgcaaaaccttcaagatcttagaatctttattcttcaatctatgtccttcatcacagataacaagatcaaggtttctcttctcattctgtagttcatccttgatactgaggagtttttcataaccaacaatcaaaacctgataagttcggggaacttttaggaagcttctcacttgagccttatcctctgttggagagttcctactgtgtaaggtcaacactccaattctattcataggcaaccattttttgaactccttcttccaattaccgattaaagtgacaggacatacaatgaggaccttcgatatctctccagcgagagttactcctctctggtttattatagtcggataaggtgtttgtttcaagagtgtccaaattagcgtaattgtcatcaacgtctttccgagccccatctcatctgctagtaaacatccttttatgtcatcatctctctcgagaatcatgctttcgtcaccttttgtatgtaccatgttcattacgcagtcatagagaaatttgacaccttcgcgctggtgtggtcttagtgtcttcgacaatagcgggtcaacaataacactcactttatgattctccgttttgttcatgatcaatggatctttaatggaaactggatcaaacaacggcgaataagttatctgcccaattagttcttgactcagcggtggtagagcagatttgacagttggttgatctactagttgtttctgtgctggaggcactttaggctctccgtttaggtgttttctcaggggtttgaatttggtcgttattttcggtatgaatgtctgtattggtggcttactttctatggttgctttatgcttcttggcgactggaatatccgttattccaagtgtatgactgactttgattttacatatgtcttgcacagagcttaattcttcttgatcgcttattctataatcgatttgaaactcggtagatccgattctccatatggtctcatataaatccctatccttgattggaactgatcctaaagagacaccagcttcgttgtaaaacttcaatttatcgtcgcttgtcatattggcgtatccatcaccatcccacgtcttgttcttcttatttgtaacccttctgtaatttgctgtaaataaagaaacctcctgtgatgacttagacacaccaactggtgcatttacgctggttttcaaactttttgggccggcatacgttagtttcacagtttcagagctggtattggtaattttagtatgtgaatgatgagactttggccgaaggccggtgtgtatctgctcagaaagggtatctcttccaggtctacctaccatgcgtggacgtttgaaaggtttattgacataatgattcatttatttgtactttgtcgctcttttccactgaagtaaatgctttgataccagatggggagcgtactattgcctgtgttatgcgatgtgatgtatgttgtttacgtttaagatctatattgacattatgcatattaaaacgcgaatcttgacgtgagcgctatgagggtaacagtaacaactcatatttgcgtctgctcccttggttaaagatctttgtaatagcaatgacaggagttgatacaaaaggcctcaatggtgggtaagcttctctacccgttaacatgcattacttctctttctacaaactcatccccaacatatcaccaatcaaaggaccaatacgattctgaatctcaaaacaataagaaattggttccttggcccagttggttaaggcaccgtgctaataacgcggggatcagcggttcgatcccgctaggaaccattcttttttggttttttttactccttcttgttctacggtatttcccgttagttgacaatgctttagttcaaagttcaatcattaatatctctgtccaaataacctggttgtactgccaattgaccggagacattatgttactcttacgtatcttttcctgtatctgttctatatgtgaaccccataccctggaagccaacatttcaaatttgaaaaatgcgtaatattgcaatatgtaacccagttcactaaaacattgatacatggagattgaagacaaacaattcaacaatagctaactacttataatgtctgaaagtgaggagtaccacatttctgaagccgttgataatgttgaagaaagtggctttcaattggccgaagaaaccaaaatcttgcgtgatacattggatctattgttgaacaaatcgatagaacaacgaaggatttgtgaagaattaaaacaggagaataaatatttacaggactatattgacaatatgatggaaatgggtgatgtgttgaataaatgattgctgcttttcgaatctttcccttggcattaatctcttcttcaattttcaaagctgctgtcatccgtcgacaccacagaagataaaagctaatcatcatgtatggtaatttttgtgtgcaacttccatgatgctttcttaaagtctatatggatagcgttcattcaggaccccaaacaatagatctaagtgcctattatatcgatcatgagtgttgctttaaatgaaaatgcaggaccatactcggctgcggcaacgcaattcgagaaagtcattaaagttttaaaacctccatcattgaaagagcaagcggtgaactcaaggaatgtcaagagtaagcttgatcgtgaaacgcaggggctaattgactatatcagaactccggaaccagcgcttgtgagagaaggtcatacttccaaagttcttgttaaacctcacgacctttctccattggacaaaagttcagcttccgcgcccgagattgtttcttcattcatccctccagcagaaaatattgcgaatgagagtcgattgatacatgtggacgtaccggctcgttttagtgacgtccctccattgttacctgatgacgcacctttggatttgcgatgtttggggggtagacctgcgccagggtttgacataggacccttgaaggttgactattgcgaaaatggactatatgagaatgaaactatcaggatggaatggaaaatgcagcagatactatcatgcgagtttgacgataggaaacagtttcctgcatttgcaaaggaaatggaattacgcgagaagataagtcaatctaaatggtatcactatcccttatattatgcgctaggaattgatagtactggacttttccagttgaaagatgagtttgactggtaccaaaagcatccatggtctgcttttgatcagattgagtccgactttttggatttggaattagaagaaaatgatactgcaaacacttcaaactctggttttactactgacgatggagatttgacacttccaatttcagaaacatcggaacggtcacttgaccgttatttaccctgatagatatataatttgtctaccatgtatgtagatgtatttatatgtatactctgttacatattcaattcaacgttttaaatctcaaatttgcttgagtgccaatctggaactcgaccattttgttcgtactcagatttggcaatttctaagttatcaagaagacccttcatcaagttattccaagtatagatcgacgttccgatccagggtcccattccagcaacaacgtttttttgttccacaatgcagttctccacttgactactgtcagtattgagcacaatctgctcagatatgtgtttaaagatatctatgggtagcttagataacacattgtccatcagaactgacaagggtatttcgtcatcatcattagagtccgctgaattttggtagaaaatatcaacattgtcgcttcctaatttacttgacctactatatgaatccaaaattctcccatcaaagataggaatgagctctgtattctttgagtttacctcaatataaagtccgttcctaattcctgctccaataaatgcagcaaggcaattcggcacaaaacagatagagttcaccttaagtcttccaaataaaaccttgcatagcctttgttttctgagtatcgacaaccaaagaggttcagatatcactattttaacgcctttactattatacatcaggatatcatggaaccaactcctacacatggtatgtacctgtatatcatcgtctagccaatctatggttctctgtattgtaccaacgaagttaaagtctcctgcatagccaatctctactcgggtatctcctatattaacaacaatcacgacagtcatagcattgtttttgattgaatactttttattgaatcatctaccattcaggagacaagcaatcttcgtttgttgctgatatcttttgtccatgtacggtggattaaaagatgctcttaaggaaatcaaccttaaatatagaaaaagaacttcaatattcgacatattctaaccaatgtacaagcaattaacggagcttaaaaagagaaagagaaccgtcaagaaatctccgagcatcaccactgatcactcaaaatgggacttattatatctttaccagttcagatggcagctacttgcttctcttcgatgttggggtcttgctgctcatcatctttatcctctttagggacacttacttcttcttccttaatgactcgtatcacatatgcgttatggttgctcgttaattctgttatatcatgggtatcgatgtccacgaataaatctatattatggcctgataagtcatgcacaagcacaggggagtgtgggttctttaccgttcataggttgaattttgcgttgggaatgatgcatatcattttggcatttatcatgataaatataaagtctactgcggatgcaagagcaaagttacagaacggagcatggagtttcaagttcattttttatttattactcattctatttgcttattggatcccaaatgaattctacatctggttttccaaatgggtcagtgtacccagtggattcgtgtttatcttgatcgggcttgtgctattagttgacttcgcccatgaatgggcagagacctgtatacagaatgtggaactagaagatgaaagatccagcttatggcgaaaattattgatcggtagcaccagtttaatgtacatcggaagtgctgtcatgatggttgtgatgttcactttattctgtcacgacggatgtgatatgaacagatcaagtgcaactataaacgtcgcattatctgttatcgtgtcactagcctcgatacatccaagggtacaagagttcaatccaaaatgtggacttgcgcaaagttctatggtatcagtatattgcacttacttaacaatgagtgctatggcaagtgaaccagacgataaattttgcaatccattagttcgtacaagtaacaccagaaagttcagtaccgttctaggtgcactgttcacttttatcgcaatcgcatatacgacaaccagagctgcagcaaacaacgcactaagaggtagtagcggagcgatttctttatacgatgatgatgttgaatactccgggataggagagacacgtaatcaactgaggttgcaagcgatcaaacaagcagttgaggagggtgctttgccccaatccgccttgcttgattatgaagctgagcagcaaagaatgcatgtcaatgattctggtagggaagatggtgatgatgatgaattcaatgtaacaaaatacaattactcgttgtttcatttcattttctttttagctacgcaatggattgtgatcctattgactataaatgttacacaagatgatgttggagattttattcctgttggcaggacatacttttattcatgggttaaaatcataagtgcttggatttgttatggtttatacggctggaccttattcgcacccattgtcatgccagaaagatttgaatatgactattagaaaacacctatcgaagtggtaagggaaatggatgtgtgtcacttgtttatagagttgtactattctgttcgtaaaaacgttctatcgatagaaagtatgtctttcttacgagccacccatagtggcttattcatcagaatccattattccacgctcaccaatgacataaacgcactccttttccggcatatcaggcgaatcttgtaatttcgcgaccctttcgtcacctctaccttttctcaataatattcttgtcgcacttgcatgggctaagacatgtcctccgacaggtttcctaccatcggcactagcaaacaaggcagaagcaccgggatcactttgaacttggttggtcatgaaaactgcgatattgttctcctcagcgatacgattcaatctagaaagatgttggtttagtttttgctgacgctcgttcaattccccacggcctgaataatcaactctgaaattggccataattgagtctactattaatagtctatattctcctgaagagagttcctcgccaagctgttcaagtaactccatctgatgctcactattgagtgccctggcgtacgagatattttcaaggcacacttcgggatccaaatcatacccttgtgctatctgcttgattctttctggtctgaaagtaccctctgtatcaatatatgcaaccttaccctcaggtccatttagttcttttggtaattgagctgtcacgcataacgtatgggataattgagtcttaccgcacctaaactccccaaacacctcagttatggacattgtcattattcctcctcctagtacagaatcgaattgtttcgacccggtagagatagacataactgcttgacgaatctgccattgcagagttgctggaataaagccaatggtgatgattttattggcagcttctttaatcttttctaccttcacttccgataaccctctaactttacacaaattccttctggtcgtcgacaaacaagtgttaacggtaaatataccagcagtcttcaatttagttatatcagacgcgttaattccgaagttttgtaactcatcaatattgaccacattggttttagtttctgtctctgtagacatgacagcttaaatagaaatggaatgggacgtttcaagtagaatgaaatgcaaagttattggtttttaggatcaccttctcgctcctagttatgtgcactagatatctcgctatgtcatattcattggtagttgggtttgttgatttggtttctgactccaaatcctttttatactaaaatctaattagccgccatcattttgaacgttttgataatccttccgaagcaaacacactaatagtagaagaactaatgacaaagttgagagcttgagttctattatgattttgctagtgtacagatctacaagatacttagaagttgctatttatacattgtttttgttgcaattggttggtaagaataaagactcataagaacaagactcttgggctaccgaaatcaaacgagtattgaatataatatgaactggtgtatcaatgtagagttattgtgtgcagatgcgaaaagggtgtttgtgtatgaaatagaatttgttatctgttgaagtagttctatcaaagaaggtagttaatactggtaatgaataaattagaatttcattttccatggttgagtttctctgatcttcaaaccaaatctcttatcctcggacaattgagccagtttgaatatacctgcaacgatattgcttgcagtatccatagagtaaacagaatgaacccagttagattttaggtttccgctgattcttagcaactcttcatcacagatggctacagtgacacattgacggaccacaggaactggcgtagagtgtttttttagcaaggatttcaactgtaggttggacaaacctagtttaggtagaggaagctcgaaacctgggtataaacctttattctttgccatggcgtcataacttgacacaccggatgggtttgttagatccaagatcttagcccaaggaacgtgttttacgatggtgacatctctgtcgattgttaggtagttgttagaaatttcagaaagacctaatctgaatggcttgatttcttgcttgatggtttcgaaatcaggctcctgtacgtccaatgggaaagaatcagcgatatgagctaatttggtagggtatacaccttgtttatccaatctggtcaacacttgtctagcagctcttaactttagaacatggctctttgaaaaatcacggcagatggcacctggtctagccaccacatcagaggattcagatttaccggagaattgatcgacagtgtgtaaagtgatcaaacctggctccaatccttgcaatggagccaacttcaaatcgatcatgtaaacttcacccttgacaacggtaaaatcatctgttgggaccacggtatcttcggtgataaatgggttcttacgcttgacatcaacagcagtttcattgacggttctagcaagcatagcagcttcctgatgagactcagtccaaatgacacctttgaagtctctttcgacaatgatattttcgttttgaccagaaaggaatcttttgattcttctgatacgagaaccaggcacaacgcaacaattataagattgagcaatggtgtcaactacggtcctaatcaaggaaccagtgaccttcgtagcgttgaaatcagctggaagtttggtcaaatcgtttgcagcagctaataagttagtgacggactcaacagcgatatgggtggcagctagagcatcagctttaccacctagcaaagcagcttcaggtagcaattttccagattgggcatcctgaacggttgggtaaatgaccacggtgtgggacacgttacaagtgtacccatcgatgtgacaacccaaagtgatcttagcgacatcaccaactttcaaaaacccagacaaactagaagtaacaccgttacatagctcgatcgatttggtagatctagatttttggttccaacgggacaagttttcgatgtcatccacttcaggacaccagttctcgtttatttcatcgatatcaatacaagttggcattgagattcccttctcgttaaccttattgttgaacttagtacttaaacaatcggctatgaacgaatcagtcaataaacaaagttgatgaatcggtagcggctccatagacttctcatgatacatcttattgatcaaactgatcaaaaagtttaaagcagtctgagcaatttgacctgcagttctatatttctcaattgttggttcgatcaatacattcttatctttcaataacacctgagtgtcttcctttgagatttgtaacgccatagtacggataattttatccacaaattattagtattagctgttttctgatacaaaggagggaacgatacactatgataatgatgtaagtatgtacctcgtttctctttacctcatctcatctcatcgctttaaagttttcactgatactttttttttccaaatttctttcctggatacaacctttcctgccacacagcactaagatatttcaaaaaattttccaaaatattacccggacctcgatcagaagagaatgaaaaagaaatcactttctgatcacgtgcgccaaaagtattaatattcgggtaatgtgtatcattagaactcatgacccgcatattatccgggtaatagatctgctgcccatgttccacccaaacaccgcgctgtgcacgtcacttttcccactctttctaacaacaatcccgtctgtctaattgaatcagcacaataaactctacctacaccagacgaaactgtcagatatcccataataagtagaatatcaatactctccgcatcatcagctacccaacggttcaagtttgaccccaattagagcaaaattgaccttgcttatacccacttcttgttatttcaagtcccttatctataccgactggctggctacgaaattttttgaagtttttttcccaagttcacaagtatttaaaggcggatttaattgtgaatatgatgagaaacagttgttgcgtgattaagaacctttttttggtctttcagtgatactgagccaagcaattgattaattgactgactgattgattgattgattgatttttgtcaaattttttggaacaaggaatcgttcattagttggcttttttttgttttaatatagaatcaggaactcagagcttcttcttctttatttcttctctatacaacatattttgccatcactactgctgagtgtgtatttgtgtgttctaattgttggtcgctatagtagttaataccgaaaagaacaataaattaggcaaaccatgctatctttgaaagctcaatcctctgtggttgggaagtccagctctttgagattggttagaaacttttctaaaaacgtccgtgctttgtcccaggttgctgatgaaactaagccaggtgatgatgacctagttcaaattgatttgccagaaacctcttttgaaggttatcttttggatgttcctgaattaagttatcaaaccaccaagtccaatttgctacaaatgtacaaggatatgattatcgttagaagaatggaaatggcctgtgacgctttgtacaaggctaagaaaattagaggtttctgtcactcctctgtcggtcaagaagccattgccgttggtattgaaaacgctatcactaagcgtgataccgtcatcacctcttacagatgtcatggtttcacctacatgagaggtgctgctgttcaagctgtgttggctgaattgatgggtagaagaactggtgtgtccttcggtaagggtggttccatgcacttgtacgcccctggtttctacggtggtaatggtatcgttggtgcccaagtcccattgggtgctggtttggccttcgctcatcaatacaaacacgaagatgcttgttcttttgccttgtacggtgatggtgcctctaaccaaggtcaagttttcgaatccttcaacatggccaagttatggaacttaccagccgtcttctgttgtgaaaacaacaagtacggtatgggtaccgctgccgcaagatcttcagccatgactgaatacttcaagcgtggtcaatacattcctggtttgaaggttaacggtatggatatcttggctgtttaccaagcttccaagttcgctaaggactggactgtctccggtaacggtccaatcgttcttgaatacgaaacttacagatatggtggtcactctatgtctgatccaggtactacttacagaaccagagatgaaatccaacacatgagatctaagaacgatccaattgcaggtttaaagatgcacttattggaattgggtatcgccacggaagatgaaattaaggcttacgacaaggctgctagaaagtacgtcgatgagcaagtcgaattagctgatgctgccccagctccagaagctaagatgtccatcttgttcgaggatgtctacgttccaggttctgaaactccaaccctaagaggtagattgcaagaagatacttgggattttgctaagaagagctttgctttcagagattagagcaagaacgaattaggtaattgaacgttaaagttaacttctttgcgtttatccttttttttattcccatctctctactcttcccttttcgaaagacaactatattcctataaactgccctttcacaatattatgctataaggttcacaagatgatactatttgtatagtgcatctgctattttccaccaatcaatattaaagtaccaaaatcataaaaaaacaccttttagatacaagtgttttttattcatttcattcacggtatggtttctattcagataactgtttttttcggttttaaaacatgaatgttcatctgtgacttctcattctctctctctccatgagacttcgttgatgcttattctcaatgccgagaacattatctggttactgatgcctgccattacggattacctgcgttttaatttcttcccaaacaaaacaacgatacagaattttctcattactcccaaaaactacctcaataattcgtgctacaatcttcttttcttacgttgatcttgcgcctgttataaacatgatttattgtgaactaggttttgtaaactaatctgacattgttcttcaccataaattgtctctcccctttttggttgctacgatacaatgtcgtcaaatgcgaagccgcatattagacagatgaaaagttacaataccttgtccatcattgaatcatctactcacctttctaatgactgatctcacgacgacttaccccaataatcatctcatctctatttactagacttacatctagtctatatataaattgtatttactgaattaaagtatcatagatatactagagacagttttgtcaccctggttccagagtcactgcaggaccctactcatcgacttcctaaaatgtacactttgtcctgatttcatcactatctctgttttcatttaagggaagaaaattattcattacttaagaccgttgatgtttaaatctgaaacaacctcaaaatggcatcatgatgaaaggggaaaatatagtgattgcagattccgggagatttgagattcttttagtgaattctccaaagtagctaccatgatatcgttacttatgtgctaatctatcaattgaataactgaacaattattgttcaaagtattaagaatacatccaaaagtcttcaaactttaaggaatttaagagtaacactacggctgactagagcatattaactattactttgctagaaatgtctagaggtaatacatcatcaatgaattctcaggatatcttatttcaattgactaatgtgggatcctccccggtgcctaaactggatacaggatccacttcagggtccaatacctcatcgccaagaagatggacagagcttttttctaagaagagagtgaagacgccttcagttggtactccatcgactgcatcatccatgatatcttccttctatgatagttctcccataagaccagtgtcaaaacagcatcctaagcacctcctggtagatccgatcatgccgcctccacccataatgctctctcccattggacatgagaccttaggaaagaagcccactcgaaaaaatggtaataagtcttggaaaaatgagagatgttgcatatgcggagatctttgttcgttcaagggttctaatgagaaggtaatccctttggagtgtaaccatatgtgtcatgaagattgtttaatggtgagtttacgacctcttcctcataaatcaaacctgtatgatgccttgccgaaatgcgacatctgtagtatgtcatgcataccgggacaggaagatatgcgacagaaggtaaggtcacacttgttaaccttacctgatgacggtgaaagtgttggactcgaaccgtataatcctcaagaaaactacgagcggataaaattgtgcgatgcagacctcttacccaagcactcaggtaatgatgaaacgtttccacatttgcagactactagaacaactgcaagaaataacgatatcaggttatcttttgcattttctttgaaaccagggaaaacggttactccatctcttcgagattccatccgtttgcataggagtcgcagtataaaaagaagatccaacttcagaggaagtacggtttctggcttgtcgtccatcgtatcatcttcctcgaaagatgactgtcaactgccttctttgcacgttcaaaggcagtatttcattcaagcgtttttgaatagttttagcgaagtcaagccttgggaaattgatgctaaatatggactcttacgattgatagataattttttgatatcattagatggcataaatttccaacaccaggtttgctacctattttcggaatatttactagtatgtcgaccatctcctgctacttcggcaaatgttcttcaattctcgagctaccgttgtttccaattgaataatcctcctgaactagatttattagatgcaactactcttgaatcaaaatctcgttctggggaaagaattcttattaaaccttatgggttggatacaaaagctttagaaaaatggataacagctctatttgatcttactttgccgttcggaaattatgatttcacttcgatcaaggttcccgaatttgtggcttgcattcctagcaccaatgatacaggtacaatcattgtcagacgacagagtaccttaaatgaaacccttatccctaaaacaattcgagattcatccgtgttaacctcaatatcatccattttgtccatcaaaagagcaacaccaaatgaattaaatttggtgttgcaattagataaaagaaagactaatgaagataatatcgtctcgatcaagaacgtcattttagctttgacttggaagttttctacttttaactgctgtattgttgatgttgaaggaatggtcatcaattgcggaactgctaacgatgttctcaattcgttggctggtccgataaaaagtaatggtaatcaaccattctctccagatcttttacaccaattatggtatcggcaaaaacagaaaatatgcaaaaatgttggggttgttgttttatcaaactcatccatggagaatggtaaatcatgtctttttagcgattatcgaatattcgctgatgcaggcaaacggcatccaaatgaattaaaaataaaagtaggctttctgaatgtagattatagtgataatatcaaagaactcgttgaaattcaggactggaacgaattgcttgaagctgttgcctatagttttaatttgagctttgatgatgatttagatagtagtgactgtgtcagtacctcctctagtgattttgaagtggattcagttccagataagaatagaacattccggctttcatcacctatatcctgggaaaatcacgtacaggctgacttgacaggatctatgaatggtattagtgaatctattgaagaccggcaatcaaatcatatgtacgactatttataacattttcactctctctaattcatcatatatttttaccatccacaaatctctctcttgcctggatcgacacataaaaatcatcgattttcccgagactccaagtttatcaacaacgtgaaattttgaagagtccggagtttctggtgttattactgaacttaacattatccttttgtttggaaaccacataacaaaagtcctactactctcttcatccatgcttttccatccgtcagcatacactcttgagagactatgagaacctggattaatagagttaaagtctttgtctcggtccaagagttcctgttcactgagggcacctgaatatagatagcatttctctatcggaatcgttaaaaaatgtctatactttgtcgaatctttcgcgtagccccttatggatctatcgaaacagtggtacaacattataaacccaggaatcaacaccatgaaatgcttgttgaatactgaatgttttctggatttatgataaattaatccttggtgtattataggacgcgacaaagcatgagcgctgacgttgtaaatatgatcgtttgttgttgataattctgtcatccatttcggaacaaatgcagatatgtgcttttcctgaagttcagttatattgaaggtgttgagattctttattttcaaatcccagagaagctgtcgatcagcagctagtcttcgcttccagtagaaggctatttcacgtagtcgtgataaccactcttgacatgtctccggatcaggcgccatgagtagtttactgacatttttaccaattactaactctataatagaagacttcgttgcttcaagtgtttgactattcttccataccatattatttgcttcattccatattttcatggtcttaatattgaagcccgatgcatctaaaagcttgatatctgtacaacgagtcaagtcaatgcaattatccgctttgagtattagtgatatttttctcaggaatgatctactagctcttgcgtcgtgactttcaaattccgcagttgttatattctcgtttaaccaagcgaaatgaccattctcatctaatggatatggattatcttcgtacactctaggcatggtttcaattaagtcatctagcctggctttatctaatactactccgaatggatcgattacgtcatcttccggtagtggtggtgtagccttaacggatctagtcctaaaaaagagcccgtttgaagtgaaccagtaggaaagcttaaaatagggatgtgagagtttatattcatttttatcgctgaaaacaatattgttttcagataaaaaaccctcaattggcgagggctcattaatgaccttaacggtatcagtgtgattatcgatgggtttctgtatggatctggggtaagttttaagcctacgatattcaaatatgtgagattttctcaaaacaaatgttccgtacaacaaatcagtttgattgccgtaagaccattcaatcctatcgtaatgtttccaacatagtcccattagtatattggaagcatcccattttttaacctcatgtaaatatccaagttgtataagcgtctcacgtataactagcttcaaatatcttaatattggaagttgtgctacacggtatccattttctagttggaatattttcatcacttcctcctcttctgccgccttctttgctaatttccttcttattatttctgggagatctacatttagtgataaatttactattggaatatggatgtcaatgtcacaaggttgtgctgcaggaccaatgctggatctcaaaaataccaaccacctactagatgataatagattatcacatcggaatatgaaaattttcaaaggggaaaattgtttcttcgatgttgctgttttcgtttttgcattatccgcaaacctcatttcttgtgttaataggtcatcttgtttgacaatgcaaatacttttgtccaaagaattataaaattcaacaaggcatttcttatctaaatcaaactgaatcttgcaatgccatggttttctatcctttgttactattggtttaatttttcttgaagtgtaaagttgtagccttactggagcatccgggtttcccgtccctctagctacaacgaaatactctttccatcgttcataaattctagtatctactggttcatcttcggagaaatgagggggaattactctggcagttaaagcttgcttaaccataacaatcatcttttccatcttgatgattttcccaattttagtactatctaaagtgattctattatgttctggggagggtttttcccaaaaactcccgaaatgagcgtctggtaccacggcactaatctttttgccaatagctttgaaaggggtataatgtgcatgcgaattattgattcttgtctgctcctctcgagtaatcggttgaggaatcggctttagtattttaagtggatctttactgttgagtgaacttcttctcgacgtaaaagatcggaatgtctgtctcgttggatgtctgaaaataagacgttggttagcattttctttgtttagtgtgtaggtccttacatctaaagatcttgtttcattgtcgtctagtacagaaaaatcggtaggtgcttcattgtactcgagagattgttcttcaagatccgaatttactgtgctttctccatcatggccaattaacggatcctcaaaatgcattacatcagcatcatttccacgatgcgcatcactggttagccctgatggactttgctgcactacactaggtgaattcaagcttccattctgtaatgacgcttcgccgtcgtcttcgtcattatcatcatcatcataaacagtgacaagtttagagggtttaacgttttcatcgaaagctttgttcttatctgcggaatgatactgcctccaatgtatgaatcttgtctccttacctctacctttctcgtaaacgtattttattctgtttcgcaatcgtacatcagtcagcctctcaaagatcgtgaagatgttatatgaatgctgaagattccatatttgtggaattccacctattaggacggatcgatgactttgtgaaatctccacagcagagcaataagttagctggtgggaggtgaatgagtgcttggggatctcgatctttttcatcgcagattccccgagacctgcattttccctgatgtattgtaagaatctatcatcatccaatacaatatctattagaaccttaattctttcgtccatatgaatgtaaaccactcttctctagtgatatttctcaagatattcagtaattcatgccctgctcaatagtagtaaccatcaagtatcgtaatgaagaattctctgtttaagtttttataagttgtgtttgtgtacccttgaaatgaaattattccaaagatttaagcaaaggttttcttgggatttatctctgtcagatgaaagcgacaaatacaacaactatttgagatttatccacataatcttggttgcatgtcataaagagttgaatttcattatgtgtatttactaacagtatgtaggtgatgtgaagtggcacatatatgccgcttcaggcagaccagaactaattttaaaatatcaaggtaagaaaccattttgtcatcagttataatggcaagatgtttggagagggacctaatggggtaattgataatgggttgattttagtatgggatctagtgtaatgccatttgatgtggttgaaattggtagtttcttggaaagcttcgtagttccaatataagtttctgagccacaaatggatgtaagggtaccccgagcgaatagtgttcaaattggttttgaaatgctgaacgtatacagggtcaaatcttacaatggtaggatataatctcaagtcagcctcagttaattgatctcctaataggtatagtttctttacaatttcctcctcagaagaatgagtagatttcaaagtttcgtaccttttctttagtatgccttccaccttatccaaatgtttgaacacattcaatacttccttctcgtagatgtcctgtttctcagcaaacccggtcttgtaaacaccattattgatggagtcgtagacccaggagttgatctcatcgatttgagattctaattcttttggaaccaaatcgatgtctggatgagaatctgccacttcattgaaaacaccactgttgaaaattctaataatctcagaactttcattgttaactatggtttgggtcttcaagtcccatagaacgggcacagtgaatctggctgcatattccggttcactcttgaagtacaattcgctaattctttggaaatggtaattgtgatcgatggtaccgtcaatgccgtatttgatagagtgattatctacatcagcgctgacacagagatccttttcacatttgagacctgcggatggtttgtacgattcctttccatcggttttattcgattcattatatggtaaaaacctccatcctttctcatccatgtgccaatgcacaacactgataccaataacggacgttaatcccttcaagaccctggtaatcaaggtgcggtgagcccaaggacacgctaaagagacatatagccaatatcttcccttttcaggcttgtagatgggatgggtggaagaaatggtttctctgaaggaggagacttgtctcttaaatgaaccgtcttcactggcaaacttcttcgacatgatttatggctatttgtatattgcagggcaattgtatatcaatgtttataacgaggtgtatttgcccccaccgtctggtggtaagggaagcgtaacttattctggagaagcattccctttttatatctaaattaagggaattctccgttacaaataatgacagcaatttgtcattatcatgtcaaaagacaaggaattacataaggaaaagtaaggtttgggaggtaattttactaatgcatttagtcaagagctcactgtggttgaattgaaatggcttgtacatgcttaatatttgatttggcattgtagaacgtagtttagtctttagtttataaatgttgatctggattgtgtctttcgatttgcgaattgcaaattattagtgacctaaaatcacattggccctatgaatgattgaatataaagtaataatattgtttatgctagcatttacgtatgacaccccgctcttgtgtaagaagtcaagaagggcgcgcgcttctacctttctctagaaaagatttatgtaaagtagtcagaagtcattccacagccttagacgatatcttgttcatcgtcattagcagacaatgcaatgttagttgtcttgaagtaagtaggctcgccaacatctggatttagatgcaaaaacagatgcaccaatgccattggccacaaaaggacacccacaatgatactgaagacaccatcatatttcaaaagtgcgtataataaagtgaataaggctcccctgcctgcataagtgtagtagaaagaggcatacttatcgagtaacggcaattccctgaattcaagcacaccgagtaagatagataaccctaatccaatcaaacttccaacaaaaatgtccaaaggtaggatattaaagatcgcttgggtcaaaaacaataaggtcaatacagcagagaatccgatacatgcgaatctgtaaaggttcaaaatttgtgagtctgacatggttttaaaaagtaaatcaatcaaatctgctaactgctctagtcaccgcgtcaattggttactatttcccgttgtatcagctcaatcagattacggtatggctgtttcgaagttaagtgttggtaataatgaaagaaaatcccttttgtaactaatttgacatattagttttgtccaaacaaacatattttacctggggttgcattctgacagaatgtgtgttcaaacggtcacgatatcaggcttgaagtaacgttacgtactgcaaagtgtagaatggttcactttatgtatggagctatatataccgatctatacttgtagttagaacgtttattgtattccgtggttctgccagatgaagcagacctacagcatcaactaaaacacaatgcaactgagaaaaatcaggtcaccaaataagtgggatgtgaagtacagcgtactagcagtttagccctgtttgtgcaacaacatcctataaatagagcgatgaagtattttatttcattgctattactgtgctttgagtgaataagaaatacctggggaagcaacaaaataagaaaaaagagacattgatacgagaggactgattgaagtcaacgaacaatcaatcaactgtttggatgatgtttaagtttcctttatgaaggataaaagagagaatatatatagacataaattaatgtaatgacggtgaaggaggggaataaaactagaacattaatcaattagacaagccaggtgaaagtgtagtagttaattagtatagttaaacatttattggttactgtttatttttatgggcagattggatacaaatagaacaaaatggtagcaacagcactaataatatcgaagagtagtctggtgaacaataattaaactgaatttctctcctactatccgcttccaagttatttataaacgagatagtgtagacataaaaaaaaaaagacgatgaggaagtgaattatcttgaacaaaaaggaagaagaagtttcgggcagagttcttcacataccgatgtgctatgacagggtgttaaaactgattagaaaaaccgaccttgaatacaattccagttgtatttttttgtttgcatgtgttcagttcttcggagggcctttgttgcaaaactacaattggaaaaccctgaaaaaactcttcactattgttcaatgtagttacaaaaaaaacaaagaataaaatccactcccaatgaaatatattttatcatttcacatataacatacatatccctatgaggacgttacatgtaattgttaaagttttgtatcgtttcatgtattttcgtaagttgctcgagttgagttaaagttggtcaagttcgatcgctgactatggactcaaatatttttatagttgataattaacataaaatcaaaaaacctaacctcacccaccagaagaaagaccagaaaaagataaagagtaatagtaagagtaatagtaaaagtaatagtaatagtaaaagtaatagtaatagaataataaaaggtataatattattgcatttccactttacaaaagtgcgagtattttaataatatcttataaaaaaaaagagaagaaagattatccaatagcgtttacaattcaaatttcttgatattccagttactttgcttggcttagtttttattcgaagtttatgagtatgagctaatgagcgctgagtgtgtgtgtgtttgcgtgtgtgtgtgtgtgtgtgggtgtatgaatacgtgaaggttggagaaaagaaaaaaaaatgtaaatttggtttcaaattagtttaatatagtagtaattctagctgttcgagttgctgttgaaacttagttctcaattttttttgtaagtttgtagttatttttttttctttgatggcggggcgtagtgaaggggtaataccggacgttagagcatttaagcaccttcagcaggttggtcttcttgaccagtctcagacatatcagaagtccacaaggtcaagttatctctcaacaattgcatgatcaaagtactgtccttgtatgattcttcggataaggtatctagttcagcaatagcgtcatcgaaggcttgcttagccaaatgacaagccttgtctggggaattttgaatttcgtaatagaacacggagaagtttaaggccaaacccaatctgataggatgagttggtggcaattctgtggtggcgatatcggatgcttccttgtaggcttccaaagaggcttgagtagcactttctctaacgtcaccggaagagaattcggccagataacggtggtagtcacccttcatcttatagtagaataccttggattcaccggttgtagcacttggaatcaaatgagtatctaacactgacaagatatcatcacagatcttagtcaattcggattcgatcttcgaacggtaagttctgatcaattgaacttgatgttcagatttttccttagcttcctctttttgttcaatggaggaaacgattctccaggatgcacgacgagcaccaataacgttcttgtaagcaacagataacaagtttctttcttcaacggacaattcttgaccagaagatgcaacattcttcatgttttccaccatttcttcataacgttctgcttgttcagccaatttggctaaatacactgaatcttcacgacttaaagacattttttcttcgtttcttgataataatattctgttgcggtaagcttctagtttaaaaatcggttatcctttaaaagtatatcacgagtctttcagatttaaattcaaatttaatcaaagacacttcaaacagtagaaataattgaaactctcttttgtatttctttctttaaaaagctgtattaaatttgaattcaccaaaagttcagtaaccaggtaaatgaattgttagtaatgtattcgtaaaattaatagaacgaaggaggcaaatgggggaaaaaacaccaccaatctgatttgtgagatgcgtttgatctttttcttgtctagtctatcaattgttatcaattattctccttcttcaattccttttttttttttcaaaacatgccacgtaccttaattggaagaaaaaaatattattctttcgagacgagtgaaactggtatagggaaatatacttgtcgttcgttccttgtctctctcttcttcttctaatctaatcaatctcttttcctgtgttgttattccacttgtttcaaccaaaacttcaggggctttttatttatttattcaattttcaattttcaattttttcaaatcaattttccaaactttttttttttaaaatttcttgtctcctgtacagcattataggaaaacgaaacaggaaccaaaaacaacacgatatcaaaatagaagggaaagggagaagaaatactgtacatacacagatcgatagaaggaaataacagtatcaatgataaaaggtaattgaaggcacaaaatcacacaaacccacaaatatgtttcaattaaagaagaaaaaaatgaccgcaaaaaacatcaaagtaagtagagatataagtgatatcgaaattttccccgaaatataggaccgatcgattgaattattttatttgtaccattcagtaacgtactctaatagctataaatcatagatccatagctttagtgtatagtcactcgaacggctgtcgttaaaaaaacgacgtaaggcaggaagacaggtcaaacacatggatcaaaacacaaatcgcaaaccactagatatgacaccaattaagatggacatagataacaaaaatcacacatacaattctattgtagttttcagctagagttctaattgaattcttctagaacaaaataaagatatttagtctttacagcgtgacaagagaggttcagtttccaaataatattattctaatcaaaaatagaataatataaagtgtatatgctaaatatcgttctattttatatatatatatataattattatatcatgggaacaagagagtcaagaaaaacaaaaaaaaaaggacaagactgaaaaagcatcatcaagatatgatcaaaaccgaaaggacttaaaacctaaaagctgctaaaaggtgactctaaaagaaaagagggaaaaacgaggaaaagaaggaaaagagggaaaagaaagcaatcgattgaaaacgtaaagcatatgtaattggtttagttcaagaaaatcggtttgttattattattcttgctctcttgtttctttgtttcttgctttacaattcgagtggcaaaaaaatcgagctttcttctgaattcctgtttttgattgtttttctcgtcttttcgctcagcggaattgcttagataggggtgtagctcagcgggcaacggtacgaggaggcttgtttcctactggtgatttctggctcgcccctgttttatttttgtgggaaagaagcaggggagggtaataccataatcagggtaacatttatgttaccctgatatactgtatatatatatatgtatgtatgtctcatctcacatgccgtttgtaatctgctgattttccacaccctgtgacttcgctgtgatcatcggtagtcattggagaatccaattcacatcaatatatggttgtgtggccgagcggtctaaggcgcctgattcaagataccaatcttaaccaatcttacagttgggaacactcaggtatcgtaagatgcaagagttcgaatctcttcgcaaccattatcttttttgaaaggttccagaaaaaattttttttttgaacggttctcactgtcagaatctttattatgattgtactttctttacattccaatatgtcttatatcgtgttatatacaattttcgaataaacaatgccagagatgagtctttccttcagaatcgtcttcagttatattatccattgagaagttcctctctatttcctgttctgcttcttctacagatatcttggatcccgatgcgcgtaactcttccgtctttttcttcttcttcccctcaagtacggctttgtacttcattatactctcttcgacagtatttcttaccatgaaattccatacgtaagtaacgtctttttgaccaatacgatggatacgggaaatagcttgagcttctgtcgatgaatccattattggttccaaaagaatcaaatgtcttgcattcaccaacgttaatcctgtggactgactgtgtacattcaatagcaaacatgtgcagttggggtcttttctgaaggtatcaacagctttagcaaatttggtgtttctcagtggccttgcgtgagtcacgttatgagcggtcaatagtgtggagagaatactcaaaaatgcagagtgcgaggaaaaaatcacgatttgagggttcttcttatgcggttctttctccaaatgttgctgttttatatacaatatcaatttcatcacttggtctaccttggcaccccatgtgttatccaacattaccttatcaacttctgttaaacgtgggaatttagtatatttcctagtaattacagcctcggtatcctcctcatgtgtggtgtcgttcccatcactgctggaattagtttgatcgtcgtccttcgtcacttgctctgggttatcagtatcatcttcttccttcaattcttcttcacggaacttgaagtgatacacttcggaacttgacattctgtttttgcacattggacatgaagtgttctttttaaaccagtgagtaacacagtccttacagaagaaatgtccacatttcaagatagaaccagtgtaaatgtcggaataacaaactgcacaagagatattttcaccgttggcgatagcagtcttcaactgacctaaagtgtccaaatatcttaccctggattctaaattgtttattactttgcaattgtcgtcataatcgtggcccctagtcactttcttgatgatattatttctcgtagtagcatttagttccgatagaggcaccaaggagtcagaaattctttgcaaataactgtaataattggtcttggcattatagatatcattaaactttttcaaaatgttccgtaattcttggttttctctcatcactctggtgatctccatttcataacaattgatgaactcttgtatgttgtgatgagcaagcttactcgaagatagataatttttcataggcttgtcgttttctgcttcatttaataacatttttaacgacgagccatcgcaaaatactatgctcttcaataactcttcatgaaacttggaatcaacttctgcaatcgcaacttctggcttaaagggttctagtgaagtttcactggcaactgcatcgtcacgattcttcaagagtctctctaatacatctagcagagaaaacaccttatcttgttcgtcgacggatttctcatactccttcgacttttcagcatcttcaacattttcgtaatcctttacgatagtgttatatgacatcacttctaaatcctttatcagtctgttaaactgtttgctttgctgattcaagatgtggaaaagtgttgatatttttcggaatcctaaggtttcaccaagaacattaccaaaattgcttttgtttgatacaatagaatcaagaagcattttgcggaccacctttttgttcattaaccaatcacggaccttgttaatctcagcgtcaacatcaaagattcgttcgtgcaacatttcccttcttagtttttcagcaatttcatagttctctttttccagctcttggaacttgttaattgtagccagctggtccactgtgaatatatcactatactgttttgggtcattttctttggctggatttttcttgttcttgttcttgttgttatttgtattattgttctttttgggcgagctcaccttgttaacttcagcttcattttcagcatctatgtcttccaacttcttagagccaagttgataatatgacgttgccaaaaagaaatatgcttggtgtaaggattgtaacaatagacgaatattattcgcgtcctttacagagctcatggaagagttttcattattaagtttcaagaaatcatgtatgccataaacattctttaaatcatcagttatatccttgatgttcttctggaaaatattggcagcatcttcaaaatcctcatcaatttccatcttcacctggccggattcaagttgcaaagagtagttttccctttgtaaggtgtggattctatccagtacttcatccttcatcgtagctaagattgcatccatgtccttgagctcatcattttctctccatggatgataattaaaatcagaaatgtcatcctttagtagtgatgcgtgacagcaaatcatcctaagcctattgagccatctagaaagttccatccgatcaatatttactgctccgtttcctctaggatcgtatcctgaatctgccaaaaatgaattccacatatgtgcataattgtcttgttcaatagggttgaattcaacgggaaccatgtaattaatttgcggaggaatcttgatttgatcttggacatctttctttcgatgtcttatagctaggttgaacttaggaaagatatccataatctcttcaggttcaaacttacatcctcggacaccattccaattttcatcaggaattacatggccgaggtgagtgtagttttcaggattttctgcatagttggcacgatgaaaggcattggaagtgcagacagcgttaaccacattctggtctaaaacctggaatggatggatctgtaggtaaacaaaaatatcacgaatatggaaataccactccacaggggtacctgacaccccccaagtatgaaccctgtggattagacttgtacagcgtgaggcattggtcataccgcctccaagtagctgtgcctcatccaaaatgaccctatggaattccataatagataatggagaagtgtaatcgtatcgtctagtagagtctctactaggtctttgtattttgctaaactcagcatagtgaacttctgcagacatcgtatagtatgaacatatcacaacatcgtattgagacatcaattctactatttctgccggtgaatcagtgttgaatttatttcttgtcttttcgaagccctcataatgaaacactttgaagtccgacacttttttgttgatatgcagatcaatttcgtcaatccattgttgcaagatactttctggacagacaattaggttcgttttaactcttctaacctctttttcatttattggagaaacgaaactgcttgactcatttgatagattccgtacattagtagagatcaaagtcagaatttcgatagttttccctagacccatctcatcagcaagtacacctctagcctttttcccactggaagggtcagagaaccattcctcatatattttccatgcctcctccattggcagaatgtaaccagtaagcttattccaaaaactatcattaatgggcatatattcatagccatacgagatatgctcatttaagaaaaacatgagttgttctcttgttgtgattctttctaagggttcatcgtaaaacccctctttccttagcatccaatctatcgattccatttgaaatggcatcaatgtcacgtcaagagcttttggcaccgcaataacaacatctttccgcaacgccttctttgagtaactaaccactaaggaatcaaaaggttccttagctcggcctggtgcaaactctccaccattgcaaatgtactgcggatctttctcaagaaagagatcacccaataacttattcgtttccatgccaaaagaattagcatcgttgatagtgcagaatagagaaaattgaattttaaccatccagttaccagatgaatcaattaacattactagcggatgtaatttgagatctttgtaacggtaggaggttggatcacgaggggtcacttttcttctcttcttcctacttttcttcgcaagtgattcctgtttctcttgttcttcagcagcccgaacaagctcatgccatgtctctacttccttcgctttcacttcacaacattctatcacttgcttgaactgggggctccattcagtacaattccatttccctaaaaaccaagaatcgtgataaaaatggatccatgtcttatcgtcttcctcattacgctcaaatttcaacgaaacggaaacttgtttgaacccttttgaagaactaaaatcaccaaaccttaactcccaatccaaaatggggacagtttgaagtttactggtagctttcttctctaacgattcgcacggctgtaacgactcgttaaaagcaaatccagacacgccaccttctataaactcaacatccttctccaggagtttccattcaacagcagaacctgtaggaaacttagcctcgtcagttgtcatccgtaccgtgtcaaatatcctggctgtcctgaactgtagattgtctctaactgtaagtagttcgatcgaattcccaatatactttttaaagaaaaatacgtatatataatgggaaaatgctacagccctacacgaaacaggttttatgttttatcttccccgtaaatggtctctaaatggtaaaataggaacgccctttaacctgcttatggcttatcaaggttgcaaaatctgatgagaggcttgcaaaccttaatatatatgttactaatggaaagaaaaaaaaagtcaataatcatggttagaagaataaacaaacaacacgacgtcacagcacacagtgctagtacgaccttaactcacaaaacatctgaatcatgcgtgcgcgcgtgaaatcaccgatttctgacttggagttaacaacaccaagcattcaatgatcttgctcatactttactgtatctaactaggtgtttactttttttttcagcgtgaaaggaaagtatatacagagaccgcagaaagtcggaatttttcacatatagaacattctccatactacaaatcatgaatagaaggagacaagtatatttccgctgctcgacgtacacggcggaagccacctgatttaatcctattctaatttgggggtgtcttcatccgccaatacctagttcgattgctttaaaaggggtcacgttaaacagataattagtatgctcgagatcggatcgtagccacatatgtagttgggaaaaccgagaaagctaaccgaggtcacgtgaatggttttaattgttacccggaacagtcagtggtatatagaccagtggtgccatatccattcaggctcgagagagacattactcaatcgcaatgtcaatacttatagcgttctccatgattttttttctacaaggacgcgggtaacaagagcgtaacctaaatatcccccagtaggaatcttaacaattgccccaataattactgtagcaatctagtgcactttctgccttgtagcaatgcaacgagttacacataactgcaatgcatgtgtaatacatataaatatatatatgtatatatgtatataaagtgtttacgtatttttgctagtcgtagtgacatattttgctaccagtggttctcaacacagactgtactcagtatgtacggtatatacaccacatacaatatcaatatcttcacgtattgagttggaatcttacaaagtgcgaagagactccaagaaaaatattagaaacaaaaaattaaagatcgataatttagaaaaacaacggtttttctttatatgcctttggaattgaagtaaagagttttccattaatcttctgggtaggatagcagtggattgcaccagcagcagccgttgaaacgctagcgaggtgtgctgtagatatctgggaagttaatacaaaaaaaatgttcaagctgaagaatatgttcaaaaggaagactcctccgcctcctgtagcaccagagaaacccggacatcgaagttccagtggtgattctactactttggagatctctttccagaaacaattgaacgtctctgaaaggggtgctaatggcgatggttctgtcagagtgattgatcgtgaggctggatccactagcagtaattcggaggagccaagttcgcatcatgtacaaatagtacaggggaaagatggcaccagtcaagaagagaatacatatgatgagagttcggatgcgacgacaacgccgcaagaggagccagaagatgtgtttccagagcaaacagagttgaaggattacacgttgattcaaaagatcggtgagggagcgttctccaaggtataccgtggtattccctcgacttccaattgttcgaacggagcgtctagcgtgattgctcagcagtacaaggaggttgccatcaaagtaattatcaaacagcagttacctaataccaataagaagggcgatgaaaagaatggtaagacttcgactgcggagcaagtgttgaaggaaattgctattcataagatagtttcgtctggcgagaacatagtttcctttatcgattttcaggaatcggaaaaatattactacatcattcaagagttattagccggtggtgagatctttggggagattgtgaaatatacttatttcagcgaggatctctcacgtcacgttatcagacagctggctaatgctgtgaaatatatgcatcagttagggattgtacatcgtgatatcaaaccagagaatctattatttgaaccaatcgatttcattccaaacccaaagccaaaactaaggagttctgatgatccgtccaccaagctagatgaaggtgtctttagacctggaatcggtggtggtggtatcggagtggtaaaacttgccgactttgggttgtccaaacaaatctatcaaactaatacaaagaccccttgcgggactgtaggatacactgcaccggaggtggtaaaagatgaacgttactcgatgcaagtagacatgtggggcgtgggatgtgtgctatacacggtgctttgtggattccctccattctttgatgaaaaaattgatgttttaacggaaaaaatatctagaggtgaatacactttcctaagaccatggtgggaccaaatcagtgacggagccaagaactgcgtaaggaaattgctagaagtcgacccggctaaacgttacacatcagaacaattattacaagatccgtggttgaattcgtacgattgtcttccatcggctgaccattccaatgcaccatcgactggtgaaaagaggagacattcgcacaagcattcaagaaaggcatacaagaaaaacgcatcattattatactcacctgctgccgttgcaatgcgtgacgcatttgacgtttcaaatgctgttcaacgtatagaagatgataaaagaatgacgcctgggcctaagaataactacaacaacaacaatttgggcgtactagcggaagatgcagaggcagaaatccaatatagagaaccgtttactttgaaattggacagcagttcaatcataaaacgtcgtcgtaacaacgtgtagattaacttcgttttcctctcgattcttatacagattattatacgtcacaatttccgatgccggtactgtgtaccgccatctctctttctcttcatatgattcatattcagtttctgtactgccaacgccattatatatatgtatactcatattatcattatacagaatctaaccttcaagcgttatgaaagggaaaagactttcaagagagagatccagaaacacttacccggacacaagccgattaacagttttatcatacatccgggtaacaaaacctcccaacgaaattcaaactacaatccgttgtgaaacgagaaacaatagataacctgattaccctgcacacaattctacacatcttcatgaaaccttcgaattcagcaaaaagaaacatcgcctgtgttcatctctaccaaccactctttgagagcatcaaatcacatctcacatcacctggcacgaaccaccgttgcatttctcttttcttttgactcttttttccctcgtttcagacagcacaaaagagctcatcgcatggtccgctgtgatgcagcatggactggttcctttttgttccttctgcgtgctaaattactactaagagaacatttttcttgccagcctggcgatgaaaggaaaccagcctagtatctctgcctagataaaaacttgttaaatccggtaaaggattattatatctgatatgccatgatgatctgtagtgtaaatatgtcactctacctcttgggctaattaaatataaacctttaattctatcatacacgataccaatagcagcactgacgtgctgctagtactgctggcgtcgccagcaccatgtcgtttcttgttttctctttcactactttaatcactgcaggtgtctaatccatccatctcatccaattaagctcgaaaaagaaaaaatgaaatttttttttttttttcttttcactatgtgaaaaagaagaaaaaacagaaaagttttcaacagggtatatattaggacttgagaagaggtaaatttttattagttataatcaacttagcaactatttaacaggttgtgtgattcagagtttgaactgatatcaagttagtataatttaaagaactttttttaaatccttcttcttttcttgttgttgtttaattcactttagttttaagtattctttattacttctttttaagctcatcacatcaagtactattactcccagatccgaggatagagaaccatgtctgactctgcacaatccgtcaaggttctaaacgaactattcgagaagttgacagttgccactgctgacaacagatctgctattgccaatgaagttgcatcattcttgaacggtaacatcatcgaacatgatgttccagaagaattctttgctaacttgagcaaggccatcaaggacaagaagactgctgctaacgttttggaagctgttgctcacattgcctctgaatctggtttgtctccatctgttgaaccattcattgttaacttggtcccaagcatctgtgacaaggctggtgacaaggacaaggaaatccaagttttggcttccgatgctttgttggctattgctaaggccatcaacccagctgccatcaaggctttcttgccattgttgacttctgctttggattctacttccaaatggcaagaaaaggtttctatcttggctgttatctccgttttggttgacactgctaaggagcaacttggtttgagaatgcctgaattgatcccagctttgtctgaagctatgtgggatactaagaaggaagtcaagcaagctgctaccgctactatcaccaaggctactgaaaccgtcgaaaacaaggatattgaacgtttcattccaaagttgatcgaatgtatcgctgatccaagtgaagttccagaaaccgtccacttgttgggtgccaccactttcgttgctgaagttaccccagctactttgtccatcatggttccattgttgaacagaggtttggctgaaagagaaacttccatcaagcgtaaggctgctgttatcattgataacatgtgtaagttggtcgaagacccacaagtcgttgctccattcttggaaaaattgttgccaggtttgaagaacaacttcgccaccattgctgacccagaagctcgtgaagttactttgagaggtttgaagaccttgagaagagtcggtaacgtcggtgccgacgatgtcttgccagaagtttcccacgctggtgacattgctactaccagatccgttctagacgaattgttgaaggaccaaaaggttgcttccagattcgacccagtcttgatctacattgctgccattgctgctgatttgattgatgaaagaatcatcgatcaacaagcttggttcactcacatcactccttacttcactatcttcgctcacgaaagaactgctaaggaaatcatcgacgaattcagaaagagagccgtcgacaacatcccagttggtccaaacttcgacgacgaagaagatgaaggtgaagacttgtgtaactgtgaattctccttggcttatggtgctaagatcttgttgaacaagactcaattgagattgaagagagctagaagatacggtttgtgtggtcctaacggtgctggtaagtctactttgatgagagctatcgccaacggtcaagttgacggtttcccaactcaagaagaatgtagaaccgtttacgtcgagcacgatatcgatggtactcaagctgacacctccgttgttgacttcgtcttcagcggtaacgtcggtaccaaggatgttatcactgacaagttgagagaattcggtttctccgatgaaatgattgctatgccaattgcttccctatctggtggttggaagatgaagttggctttggctagagctgtgttgaagaacgctgatatcttgttgttggatgaaccaactaaccatttggataccgtcaacgttaactggttggttgaatacttgaacacctgtggtatcacttccatcattgtttcccacgactccggtttcttggacaaggtctgtcaatacattatccattacgaaggtttgaagttgagaaagtacaagggtaacttgtccgaattcgtcaagaagtgcccaactgctaagtcttactacgaattgggtgcctctgaattagaattcagattcccagaaccaggttacttggaaggtgttaagaccaagcaaaaggctatcgtcaaggtttctaacatgactttccaatacccaggtactgctaagccacaaatctctgacatttctttccaatgttctttgtcctcaagaattgctgtcattggtccaaatggtgctggtaagtccactttgattaacgtcttgaccggtgaactgttgccaactgtcggtgaagtttacactcacgagaactgtcgtatcgcttacattaagcaacacgctttcgcccatatcgaatcccacttggacaagactccatccgaatatatccaatggagattccaaactggtgaagatagagaaaccatggacagagctaacagagttatcaacgaagatgatgctgaagctatgaacaagatcttcaagatcgacggtactccaagaagaattgctggtatccacgctagaagaaagttcaagaacacctacgaatacgaatgttccttcttgttaggtgaaaacatcggtatgaagtctgaaagatgggttccaatgatgtctgttgacaacgcttggttgccaagaggtgagttggtcgaatctcactctaagatggttgctgaagttgatatgaaggaagctttggcttctggtcaattcagacctttgactagaaaggaaatcgaagagcactgtgccatgttgggtctagatgctgaattggtttctcactccagaatcagaggtttgtccggtggtcaaaaggttaagttggtcttggctgcttgtacctggcaaagaccccacttgatcgtcttggatgaacctaccaactatttggacagagactctctaggtgctttgtccaaggctttgaaggctttcgaaggtggtgttatcatcattactcactctgctgaattcaccaagaatttgactgaagaagtctgggctgtcaaggatggtagaatgactccatctggtcataactgggttaccggtcaaggttccggtccaagaatcgaaaagaaggaagatgaagaagacaagttcgatgctatgggtaacaagatcgcttccgctaagaagaagactaagttgtcttctgcggaattgagaaagaagaagaaggaaagaatgaagaagaagaaggaattaggtgatgcttacgtctcttctgacgatgaattctaaacgaagccggatcttcttttcatttaaaaaattctccctttcgacgaggagtctcaaaaccaatatgcatcaaggcggattgcacgtctaatttaattatcgggctacccttcattgcatatatttataagcttactcaggatttaaacgatactttcacgtgcagagtaaagcaatcgcatcttcctgtgtaatcttcgcacattttgacccttctcaccataagagtgttttttttatttcatattatcccgcctttgtactgtttaatattattatatagtgctgtttgtttccattctataaagacgcagccttttaatttatgataaaaatcatttttcaaataattccaaccttctttctttccattcaaagtgtgttgatattttatcatcaagatatcgaaataaatgtttcgaacgatataacccatgcggacaatgttgtttttgaggctgattattttaacaagggtggcaattgcctcattatatgctcctgtgaacgtcgactgccccaaagacctcagtttaagagctgctaaagtatgtttaaaatacaagttttaatgtaacgcaaaatagccgccgagccttaatggctgttttaaaatgattaacgactaacaccaagaattccagaatgaaaaattgagtgcattggaatttgattatttatcgaaacgaactgaagtgattaaggggaaattcgagaagttctatgaggacctagccattcctggaataaatgttgatagtcttcagtttccacgaattgctgttgccatttctggtggtgggtttcgttctatgctcatcagttcagggttcgttttaggtatgcagcaacacggactctgggaatgcactagctatgtagcaggaatttctggaggtagttggactttactcaagctagttttggcggaattcaacgttgacactttaaccaaattcgatattgaaaggctaatgttggaaggtatccccaattttgatgtaaagaatcatgatatgatcaggcaaaaagattatagtgacgatgccaagaaatttgccatggatgaagagtttcttaaagaattacgccaacagtccataaatctcaacaagagagatgtgactatagagtatgaacctaattattatcatttcttggatgaagtatctgatgctttacttttcgaaggagatctcgggactgggttgcctgttttcaacaagcgctctttagatcctctctacaaaataaaaggtctcgttgaagactttttccaccaagaggaaaacgatcaggataaggaattagaggttataaacgaattaatggattcttttggtaagtttcggaaaattattggcttctatataaacttacacagacaagttcggcaaaagaaagaggcgggtttcccaatttctcttacggattatcttggacaagcgttattagataggcttcctgcgcagaaacaggatcatctcaagcagttatccaatttcgtgcaatcagaaagttttaaaaaatttgacgctcctatcccagtattcgtcgccaatgcaaagacatcaaagggacctgagttgcacaatgtagtattcgagtttactccctttgagtttggatcatggcatttgaacgtttccaaatttatatcaacaaaatatctaggatctactgcattaaaaggaaaattgaccaaatgtgtcaacggatttgataatttaggattcatcacagcaacatcatcgtctctttttaacaatgctttgttctatatttggaaaacggtaacaacaaacatagaatccaacgagaagttaaaggcaataaaaaccatctttggtgtatttggtgttggatttaatgccattcgatctgattacgcaatataccaaccaaaccctttttataaagatccagaagttctgaatttgataagtgacacatctcagctatttctagtagatggtggagaagatggtgaaaatataccgctcagatctttatttatcagcggaagacagaatgatgttatatttattgttgattcaagttcagacaaagagaacctacctgatatgacaaagcttcgagatacatacgatgatataatccatgtggaagaacaaaaaaggattgtcgcacttaagaatgagatttgggaaatggatctcatgccttatatcccaacctcagaggaactgctggcggcaaactttagtttatcgacgccgattgcgtttggttgtcatttacaaagctacaatacaaagaggttaacggatacattaattactaaagaaactagtagtgccagcttaccacctattctaatataccatgggaacataccaattacatttcagtcgaatacttccacctttaaattgaactatacgaaagatgaatataacggaatgctaaataacggtcatcatttattcaacaacgatgatactcagggagaatatttacaatgccttggctgcgtcatgcttttaaggcaaaaccaagagctcgtgtcatcattttgtgacgcatgcataagaaaggtatgctataactgaaaaaaaacgttcacgtgactttgtttccggacctcatgcttatctttcttaagcttctcagttttcgaactgatgttggttcaaaacgtaattttttgtttatacttttatgaaatggaaaaaatagaaaagatgaatcaattgtcagtatgaacaaagaatatgttatatgattcagaaaatatgcatctttaacttactgcgcaatttatgatctgatagcttgaatctatttactcatagcacgctactgtatttgaaacccaaaaacaagagttggaaagaaagagcataaaatactaggaaacatgcgtgttttttcagggtttgctaccataatattaacggtaacttttgctctactagcgaaagcagtaccagaaagcccacctgacggattatcatgggaagaatggcacatgagagatgagcacggtataacaaagtacactcctgaagaattctttgacattcatgatttaggtagcaaaggatatttggatgccaccgacattattaccatgtatgggctacacagagacaccatcgtaggtaaaggtgacggaatgggacagaacgatgagagtcaggtaattgatgactctttgcgtgaaggagccgttaaaattgtgatggcattgttggatgtagatgacgataccaggatcactcgcaaggaatatctagcatttgcagccaatgggaacaaacttgccgatcttggagttggtgtgggacatcatggtgatttcgaaactgaatatgagatgcatcattggaaccagtaccacaaggatcaagatccggacatcaagaacgttcacaaggaagatgtcgagcatgagttgctacaccacgaacatgaggtagaagcggctgaaaatggacctgtaggtgcagcaaagggtgccgtaatcactgatgatgaaatggagagcagaattgagcaagacaggatacccaagaaatttagagccaattaatggaaatatcacagctttttgtatctatatcgtatatactcagttaactcatgcatatatacatatcaaagggaacgcaacgtttcaagcaaaatatccgggtcaaaatggctaccgctaccgctaccactactggggatcgtaactgttgaataccagggttcagccttggatgggatctgaatctcactatcctgaagacggatcacgtgatccacccacgaattagctgacggaatggcatcctctgaacaggacaatgccgcttgtcgaagcgtgtcattgacaagcatcgtgtaagagacggaatctaatccatacgattcacgatcgtaagtaccattttgcaacaaaactttcttggcatggatatttttagcaatggcacaagcgatttcaggtacgattaacgatggcatcaaactagtaattaaggaaccgatactgtagatgatatagtctgcagattcaatggcttgaagggcagcaggatctgctcttggccagatcggagaaatggaaccgctatcatctagcacgtatcgaagctgctgcactgcggctgccaattgaggatgtgcatcgtttgacttggagaaatgcaattgagatgtgttattggatgagagatctgcaggatgagagatctcagattgaccagtgataacgtctccgttagcaagaactagttgcaattgtagagtgggaagaggatattcttccgggcggcgttctcctgccatatgttcagagataatgacgcatggaacgatagaaaagttcggcggcacgccgccgaactgcagaaactgttccaatgcagcatcaatcccagattgcatttccatgcttttaagtaggatattgccaacagacgctgcagagaaatcgaacttggaatctagctgctcaaccttggcggcaaatttgagaaacagctctctaaacataggatatagtttcaatctctgggataccgtaccttcttgtagcagttctgcccacagatggtgatcgccgcgaatcagactctcccattcttgtaaagcgactgttgaatccttatcgaatctatgatggaggaactgtcgcagtggttcatcctgaaacagtctaagagctctattacgaagatctccgagtgcgataccaccgaaacaacgtagtatctctgatgtggacccgccgttatcagatacggggatgatatgggtgacgctgttgccagcaggaccgtttggcgtttttacaacatcacgtgacaacgcttcaaagcaattgaccaacgaattactggcagtaccacctgtgaacactaccaccttcatggcggatggagagcaacaaaataattataactgcaaggattttgctatggaggatctgtcctttcctatctttagaagtgtttagatcagctggtaatcttgtttcgtatttcacatttgaaattatataaagggaaatgatatcatttcagaaaggttagaaactacataacaggtgagagcaacggaaactagaaagccgcttaacgcacctaaacgcacacagacgcaccaattgaagtatcagcaccatgaaagcagcagtattcagtgattttgatggtaccatcacgctacaggactcgaacgactatttgacagacaacttagggttcggtaaagaggaaaggctgaaagttttctctggtgtcttggacgggaacaaaccattcagagacggattcaaagctatgttggactctgtgcatgaaccattcgactcatgcatcgaacaattattggcccatatcaaattagacccaggtttcgtagaaaccgctgaatggtgtgctgccaatgacgtaccattagttgtcatcagtagcggtatgaagccaatcatcgaggcgctaattgggaaacttgttggtacggaacgtgctaaggaattagggatcgaagtgatcgccaacggcgtggaggtggacgaggccacaggtgaatggcacattgtgtaccgcgacgacacgcctcacggacacgacaaggctcagaccattgaacagtgcaagaagaggtttgctgccgacaaatacttctactgcggggacggtgtcagtgatttgactgcagcacgcgagtgtgacgtgttgtttgcacgtgaaggatgtgatttggcaccatactgcgaccaccatggtatcccatacatcttgtttaacaactttacagagattaaagacagaatagccaaggagctgtcttagaaggccagcgaactgtgtcttcggaatggtctgcgtcaagaacttgccgatgtttatctgaatatgtatcgctgtgtacatgttataataagaggccggattacacgatatatcacgtgacccaggtcaatggccaactcttcatcctgagttagctatgactcgagtcacgaaatatgagatagatgtaagttattctgtgtactcaattctacaattcccattctctcctacatgttacataaagtagttaaagattaacatcagtgaattatcatttatacgacttgacaccaaaaatataccatcaaacaataagatatagagtgtaaaatactatcttcaaaacacccccgtaactctaagcgttacggtcattatttcatccatttgtttaacagcctgttgaattgctttcttgataataactgggtgaatataccggcaacgttttcttcggtcgggatgcaattgaattcgcacaccctaggttgtgtttctctcttaacaccattgttctgatgcacgtaggctttgaaggaggtaatgaagaatcaggattagtgactatttggtatttcccctgttagcgtaaataataacgaatatattgctagattaatccgataatatcatatttgctgttcttctctcgcccattaattcatcatgtacgatatttgtgtcgtatttagccctaactgcatcaatgagatcatctatttgctcttcatctcttcaggtgactattatgccgtccccacttgtatcagttcatctacccaagtacagagagtccgtaattcgtaaatcgagtggggagtctccgcaattgtcgattgaactatgagtgatacgcgatcctcatttgtaagagatactgtatcaagagatttcctgattagatcaagattcagtgacttttacatgattactcatgatctcatatttgtgtttaggtttgttgttcatttgcgaactatgactgtgtgctttccgtttgccagtttcagcattgtcgaatccatcggtagtgatacagtgccgttagaactcacttgatacggagtctggcagaaacggtgacgaatctccaaatagggttctaatagtcatacgaggccttgacaactcgtcgcacgcactgtcgtctacggtatgtacgatatttgctataccaagaatatttgccgctttattcgggaattcgttgacctttcgaacgtataacgaatttcgaaattaaacagcaaataccgcagcatcgcactataatgtctccggtaaatttgcgcctgccaatagtatcctggcgtcatccattattgttctatccatccagacgctcagcttcaacatgtgcctattgtattgacagtgaagttgagccccagtgtctagcatgaatgataccattgattcttctttaccgtaagggcttgtaccgccttgaaccgtacgctttccttactttattattgccattgtaggcttttcctgcgttggtcgaggattggtatgactttgaactccgatgtgattgaaggatcaagcagcccattaattccatcaatccagtagcacctgctgatatgtaatgacaagtaccattcctatcttcacgatatcttaatccttcacagacttcagcaattagaatgctctctagattagtcaatatttttcggacattttctagcttgtatgaatcttacaagtcaaagccaaataaatattcttacagcgaagaatggctctttggcgtctagaacctggtttaattcttttgttaaccagtttggtggttcagtgaatttaatacatgatgaatagaagcacatgaaccaatgcaattgggctctattaatttttcccctgtctctcagagctgcataccttaatagattgtccattttgtatcggtgaaagtaatgatataagtcaatcatccttaactattaatgcctttagtctatacttcgcatagcagtctgggaatggaggggtaaaatggtcgatatttcgcccagttttttatcttccgttatcattgtttatttccatgatgtggaaggttttgaacattccttgttcagttacgtgtaacatacgatgttcctctgaaacgtgaacactggcgctaccatgctggaattgggtaatggtcaactcttaacacctgcatataaaagtagttaaaactgggagaaatacccgccaattgattatcatttatacgacctgttggcaccaaagtagcactttccagacccagatcacgtgaccgggactgtctctttccccttccccttccccgatggaaaaaagaaaatttgaaagaacaaacggaactctcaaaaacatcacgtgactccgtccgccaacggcaccgatagaacctcacccgccccccgggctcacaaaaatgcgcccgcaaacatccgaacacaccactcaaaccactcagacctcacagcttaactcaaagaaaccatagtatacctcaaggtaccaaagcatccacatttccggagtttcattcggagtgaccattgaactacaaattaatttagtagtttcaatggttaatccagataacatacagtacacatagcttaggtaggcccttaagaaccgaaagattccccgaaaataggtactaaatagctgttaaaacagcaaacttaatcaaaatgtaatcagtagcttatttgcactggatttccttttttcccacacggatccgttgttaacgggaaatggcgtaacaatttatttctggctcccatagtcattagaaactgatgacttttatcgctttcttgatttgattattcacatatttatgtttaagttctgtatatgtaagatatacaatatatatatatatatatatatatatatatatattgtatatatattgtctggggtaattgtatcgtttcaggttatatcttagattttggtattagtttgtgagatagatactcaacgcagttaagcatctttagcaatcaaatttagcagcccattatgtcaaagattagtgtcaagactcccattgtggagatggatggtgatgaacaaacaagaatcatttggaaattaatcaaagaccacttgattcacccatatttggacattgatttgaaatactacgatctttccatcgaaaaccgtgatttgactgatgataaagtcactgaacaatccgctcaagcgactttgaaatacggtgttgctgtgaaatgtgctacgattacaccggatgaggctcgtgtcgaggaattcaaattgaaaaagatgtggaaatctccaaacggtaccattagaaatatcctaggtggtaccgtgttccgtgaaccaattgtgattccaagaattccaaagttggtgaccaactgggaaaaaccaatcattattggtagacacgctttcggtgaccaatacagggccactgacgtagttattccaggagcaggtaagttgaagttggtgttcgagagcgatgactcgaatacggaaaatatcgaactgagcgtttacgatttcgatgaagagagtaaaggtggtgttgccatggccatgtacaacactttggaatctatcactgggtttgctcatgcttctttcaagatggctttggaaagaggtttgcctctttactccaccaccaagaataccatcttgaagaaatacgacggtaagttcaaggacgtgttcgaatcgctatacgaaagtcagtacaaatcggcgttcgaagctaaggggatctggtacgaacatcgtttgatcgacgatatggttgctcagatgttgaaatcgaagggtggctacatcatcgcaatgaagaattacgatggtgatgtggaatccgatattgtcgctcaagggttcggttctcttggtctaatgacttctgtgttgattactccagatggtaaggccttcgaaagtgaagctgctcatggtaccgtcactagacattacagacaacaccaacagggtaaagaaacctcgacaaactcgatcgcctcgattttcgcttggaccagaggcttgatccaaaggggtaagttggatagcaccccagatgtggtgaaattcgccgaattggtggaatctgctaccgtcaacacggttcaagaagatgaaattatgactaaagatttggcattgatcttgggtaagaccgacagatcctcatacgtcactaccgaagagttcattgaagctgttcacaagagattggactccgaatttaaatcatcattcaactaggaagaagaaagctagcctttccctatccgatttactgctacattatatatccataagatatatagccttaaaaacaatatttatatatcttcttcccccatagaactgacaccccatccgtagccaggagaattaagagaatatcaattaacctccgttggtccacatcacgagtaagcatctggacaaaggtgtccagtttatcaatccagtttataccgtttcggccctgtttcgctcgttcgcgatgacctgaattggaaaaagaatttttttttttcactctcaatatgactcagctacaccattcaaacctttgatccaccgttccatccttctatgaagcacttctctcatctgcttttgttctactttccccatatatataagttataagtgggtttttatatctgtttccactgtgtatattctttcttggttacacttcgtctctgttccactgaaaggttaacgaactcagtcgaaaaccttctttaagcaatgctaaaaactagagtggttcctctagcattgagaagctttgccagagcaaagtcttcttcgacttcggctcttgcttataagcaactgcatagaaataaggcaagacctcctttaccaacgatcgaaactccatcttggtctactaacagtgccatctcatcgatcctatatgaaaatccagtaatctcaaaggagccaaagaaacaacatgttttgaactgtttggttcaaaacgagccaggtgttctatcgttagtctcaggtactctagctgcaagaggcttcaatatcgattcccttgtggtctgtaacactgaagtgaaagatttatcccgtatgaccattgtgttgcaaggtcaagacggtgtcatcgaacaagccagaagacaaatcgaagatttggtaccagtatttgtcgtgttggattactctcattccaccatcatagaaagagaattgttgatgacaagaatctctttgttgggtgctgaatacttcgaggatttgattcatcaccatgaacaagatgaaaatactgataccgttgaaagaataagacaacagcaattccatccttccaaccttccactgtcccaagtattgagattgaagcatgaacatttaaacgacatctctaacttgactggtaactttggtggtaagattgttgatatcgctgaacaaagttgtattgtggaattatgtgctaaaccatcccgtatctctgcattcttgaaacttgtggaacctttcggtatcttggaagtggcaagatcaggtatgatggctctaccaagaacccatttatctgtcggtgatgaagatgatgctcaaagcaagatgaatgacatcgttgatatctctcaattgcctcctggttgatccaaagggctcacctgccatagttttgtacctcaaaacaatccaatatcaaaaaaatagtaatgtaagagtatgttttggattttgtctcacacatatagacaaattaaatacgttaacgatataatatggaattaacctttccaaatgatatatagtctctaaaaaactttcgtttttttcagtttaaactatgatgattgttgtggttcttttgttaatatgtacaaggctctaaatggtttgttacgtaacgacttggggaagatttacaatttgctcaagaaatcggtctttggtcttgtaatgacatctatcgtgttttgttcgtagttgtaacgtctggtggttagatttttcttggaaggtttgagtggttcttccaatttcttcaattctgtttctggtttcactggcttcaagaattttctgcgtagtctcacctcttcagataacgtcaagaagttctttgcatcagtaaacttggctagtacttgcttcttactgttcttgtccttaatatcaattgccttcaaatcagtaattagttgtgtctttagagtattcttttcttctggagaaatgtatttagttaattcaagcttgttgttaaatgacaatgattcattcaatttggtcgagacctgtttcaacaatgttagtttgtcgtccaacttagatttttcttggtttctcatcttcaatttaagttcttgttccaaatagtagtacgaattaaatcgggcatcggattcattgaacccattcttcaaacaagttctccatctgagcaaatatggtaatgcaaacgcaagttcttgttgatccagctcaactttcagatctgaaattatcttgctgtattctgccttcaactcttcacgtttaatctcacgttcttgctgtttcttgatcaattcatccttcagcaaataaatctttcttggtaaagcgttctcttctgcaatggctttctcttcatcctcaatgatggccttgccgaatcttctcaaacgtggttcgaaatgcggcaaaggaagctttacatccttgtataatgatacaccaatgaatttcttacctggatgaaatggatccaaatagtatctcacataacccggctccaaagcgaaaagcgtatgatctttaccgatgcctacattttcaccaggataaaacttggtaccacgttgtctcatgatgatctcaccaacttgagtggcttgaccctcgtatttttttggacccaatctacgaccagcagagtccttcatactggtacgagaacctgctgcacgcttggttgcagtacgcacctgctgcaccacaaacttgggaacttgttgccacgaagatgagaacattatgcgttgtttcgtaggcctggtccgaacagtatcaagcaatgtcacagtaactgtatttctgcgtgtatctgtacttaatgtatttaagataggattttagtgacaaaaattttccacagtatggcggattgtaaggtagggtaacaacgaaatccaacaagatatagcccttcgaaggttcgtgtaactgactgtttaagagttgaaagtattgatttatacattttaccaatttcatctattgctgagagttctttcgataccatagtgaatttttcatgcttgagaaggagtaaacgtctaattcacgtcaaagttattcgaaactgaggttccaattaaagatctaccatcactatatacgttttgatgttctcttccagcacgaaaaactcatatttctctaagtacaaaacatcaagaaaccgacactgcttgcatcgaaaagaagtcttcacctttcagatttacgtttgaataaacaggacgtccatttatagaagtttcccaaattaattatcgtgctggtgaagcccatattatctaattgaaataggaatactaagaaccgacagcccatagataaaaaaaaaataaaacaaaatatatcagtgattctagcgaaaatggcaacggaagatagatggggtcttgccgtgactcaattacaagatctatataaaataggagatattgcggggtttgagtctttagatccgaagaatatgaatttccagaatatgaatttgaatcaattggctgatatccatgagaaattagaggctcgtcagtctgtaaatgaaaagatgagaaattactgcagagatttggtagagaacatttcatacatattagataattatccagtggaagaggaacctatattaaaggaggaatccagttcgacgcatatccctgaatcgagtgttgttggtagatcacattggaccagtcaattcaacccaagtgaaccaattgaggttggttccgaagttgcatataaatctaaaaagactggcgaatggatccagtgcatatgcacaaaagtttctggggacggactccggtttgaagtgaaagatccagaacccgatgaatttgggaaaccaggtggtatattcaaatgtaactcgaaagagatcctcttgatcccgcccgtgactatgaaaagaacccagactccgaattatccagcgaatacaaaagttttggcaagatatccagaaacaacgactttctatccagctattgtttgcggaagcaaaagagatgggacatgtaagctacgattcgacggtgaagaggaaatagacaaggagactgaggtggaaagaagattagttcttcctttcccctctagacgatgagtttcttaattatatcacgttcacgaaatgtatgtaattttccatagcctgtaacaataaagaaaaaaaaattatgaaagaacattaaataaaccgtatcacattgagataatgtaggaactagtagcggtgcctgtttgtgatttatcgcatcagacgcgacagacattaaataccatagttctagtttcttattgtcgaatattttgtatatgattcatggtgtacctttttaacaaagtgacacttaaatcaataacaaaactgtgttttgtgctattgttagtgaatctggttctaaaactgatgaaggctccaattttgcctttattattccggatattaaccacctgcccagcgaacaaagatgtatgtatcttttggtggcagaagtattcgatagtagaacaatgggtatggaggttgattgattatattgattcagagagacttcaggttccacatgaacaagtttaagtcaccatttcaaagtacatctagtaaatcgtgattgctttgcagtaataattttgtaagtgtctcttacaagtcagtgagatatataaatctgtataatattatgtttgtcattacagaggttgggtttgtgctgttgttctaaatatcagtgtttagctcaacaccaccaacggtccagatttcattttcatcttcaaatctatcagagaacatcgcctcggcatctccaccggctgcaatcttgtctctttcaacagcagctagtctcttaccaactctcttggtgtaatctcctaaggatcttagttgcaaagtgtcaccaatactgttttgtatggtggatccttcgagtttcgagaaccaggaagtgaaggtttccaagttttcttcttcaacaagatggaacatggctaagtatgccttttctgcagccaacttaattgggatcactgtgtcacgcaagcacgagaaaacagatggagcgagtaaatcgtagttgttttcgatagtttcagcgtacttaaatcttgcaagcgttcttaccacgaccaaagccaatcttctactgtctagagaattactgttaggtttcaacatacacttagcaagttgagaaactaggctgttgatattgtctgtgccaagatggaaaggttcactagcatcaagtttggaataaggtgttcttgtttcgccttctaataatagagtcttaccaattgcgagtaatccattatcactgaagtaagcatttgatgagtttgttgcatcaattatgtagttaacacattcatcaattagtccagtgccaaaaacatgtgatggagcatctttcaagaatgagtttagggtcaaaataccgaatttaccagaatcttcagtcaaggagctttctaacaccttgcttttcaatattgttgcagcttcctcggttgataagatacttgataaggatccgattaatttcgcgtaggccactgcgagcttatcatttgcagataacatttcttcttcgatcaaatttaagatattggtttttgaggtttggttcaatttggaacctgcctttgatacggcttccaataaagccttcaacatagcagtcttaacaccatcatcatcactttgcttagcacctgttaccagttcgacaaccaatggatcaactctaggctggtattcaattaaggttcctaatgccttggcagcacgaagacgtaatacctcattagttggatcggacaaagatttgacaaacgttctttgcaactgaggaatgaaaggtctcaacaactgaggaattttcgcaaataggatattcaaagcataaaggatagctgccttgatgtcactattgaatctttctccaacaacacgaatcaaaggaccagtgataactgtaacataggatttcaagcctgctgcaggagtcttggagacaatatccgcaatggcaagggctgaagcctcacgttcgtcaccagaaccatacattaaaccatgtaaaaatattggtaaaacacaacttggtccctttggcaatttgaaagcagctaaatcttccccttgtttaccagtcattaacaaagcctgtttagctggtttgattaacttctcgagcattgacttgtcctggtttttcaccaagcttgttaatgcgttgaagttagcctcaacaattctaggatcggattcatccaacgatagaatagcatttgtagcgatatccgatgtatagatgttgtagtccaacgtagtgttgtcaaagaatgttggaagacgctccaaaactacaattctcttagctacatcttcgtgctttaatagtgacataatttgttgcaagagtggatgtaaaccttcataatctgttattgacaagaaaatcttgtccaaagtagattcaagggagtgttttgtttcagtgttatctgtttctatcaaagcattgacaactgaattgattattgtcgaggtacgtttgtacaatgcaggtccagctacctcagctaatgaacccaatgcgtttgccttgaaagcatcgataggaggagtcaaaagagttggaattaaaatagggaaaatcacttctgatttagtagacatgatttcttgcaaagcagataaggcgtattgtgagttttcttcttccttcaatttgttcaacaagaatggtataatttcatcaattgcaaccttacccataacttcttgatatgcatcgaaacaagttgctgccgcttctctgacggtttcatctccatcaatgacagtagaacagataatgtcaacgataacagattggaatgcctccaaggagtcactactagaggaaacaattaattcatgaagagcgatacaaacaccttgcttagagttggaatcaattgaggtatcgagagattgttttagagtaggtaacaattgcgacaaagcattacctcctacccgacgaaccaaatcacccaacgtctgggcagcaatgattctaagagttcttgatgatgacgccaaatggatgacaatcgttgaagttaattcgggtagaatctccttaatagtacgtggggtatttggaactaatgccttccaaatatcgacagttgtggcacgaacaataccagaaacatctgaacgacatacaaagagagcagataatattcttgcacgacgttcttcacccaacacttcgaccatctgtttactaacctcgctattgtattctgcatcttcttcgtcgaactcattcttcgaagagataccagtgacttggaataacaagtcacccgccaattggacagaagatagtctgattctttcgttttcatcgaacattccattttcaagttcaggcaatagaagatcaatagcttttgtcgcataattcttgacgatcaatttacctgccttcaatgcagtgtcacggatattttcatctggatcagccaatccagataaaattggctgaatgattttgtttatgtacggagcaaattgttgaccgaagcaaacaggtaagaaaagcattagaggcatgaaaccttcacgaacataagcacgataatttgtgacacctgagaggatagttggtaacaactcttccaacttggaaagacctaatccagagataacttctgccaatgcttgtgctgagcccatacgatcccctgatttagtattatcgcttaaagtggacatcaaacgaggaatcaagtctgggaactgttcttcacctaatctttcgactaaggcacctaatgcacgtgcggctgtggctcttgtattaggcacagggtctaccatagcaatttctacttcatcaattagttgttgtaagtaaggaaccaaatctctagtatcaacaaggatagccatgttaccgacaattttacaagccttcctcttagtgtttgcagatctgtcacgcatacctcgatgaataacgtggataatcaacgctaatgaaggaccatcgatgtaatgaacaaactgtgtttgaatcaaggcatctagtgcatcttctgtgtattttgttggatcaccaatagcattaatcaaagtaggaaccaatttctggatttcagggtttctaataacttcaccaaatctattcaaagactcgtcagcggcctttctgacttccttgtgggtatcattcaaaacacctacaatttcaggaacaatggtagacaaagatgcagagagttgagtgggatccaaataagccatgttacccaaaagctccacagaacctctttttgttctccaggatatatcatcaaggttagaaacagcaacaggaattagtttcttcacaccaaagcttgtggtagatgacattatagccttagtggcctgtgctgtagcttcgcgtacttcaggaactggatctcccaaattctttagaatgttcggtagaatctcaatcacgtatggctcgaaaaacttccctagaacaagagataggcactcgaacccatatgcaaccgattcacggcagcgtgggtcttttttatcttcggatccttcgattaagctgcgaataacatcaaagtctgaaagagcagaaataccgtacccctttactaaaccagcaataccccaagcagcacctcttctaatttggtttggtgcaggtgagtcaaataatgcttgcaaagagaagtcaatgtattcttgggcagagctctggaataagggaaccaaagcagataaacattttgaaattgatttttgtaattcttctgatggagtttgaagggagcttaacaaacgctcagcaatggttctaattcttggatcatcttgcttcaagtgtctagctagagaaccatatagaataacgacattttctttcatcaaaacatcagtagaagaagacaaaaagttttcaaatattggcatcaaatcttgcaaatacttactaccgtggtagttaatgatttcgataccagcttctttcatctcctggcgaacaatttcctctctatcacctaatgctccagaatcaatgaggaaatgtacgaattcaacaacagcaccaggactggaactaaatgcacggcaaagttctttcagtgcaatggcagtagtacttcttgcttcccaagggtccttttgctctgttgcactgattttaaccaaaccgtagtcatcaagaatatccttaggaggttctgacttcaaagcataaaagttcaatagttcgtggaagtaacggttgaatgaatctggattttccaactgcaactctgagacagcagatgcgtacgccctagctgtgaagagtcttagaccactatcctcctgttcaaagaaattcaataaatcgttcactagctgatccataactttgaattcgtttgatttccatatgaagttcgcgatgtccctattattttcatcttcattaaagcaagtaatataaacttcaggagagtattccataagtggttcgaggtcgtactcatcatcaagtgcctccaacacagtcgcctgaacaaattgatttgaagttagcaagcttttcaataaaaggcataaatcttccttagttggatgtattgatatattttgacataaagagatgaaatactcctttgccaattttgccttggatgggagagccaaaagagataagagaactgatactatgctttgacgagggatagatgtatcttggaatgcttcgccatgagtagatatgatatccaaagccaaaagtagctgttcttcctcaggatcttcttccacaaactcgctacgatttgtaggtttattagcattcttgattgcaacttttttaccgatttccattacttttacgagtagtggaaggatataagtcaatgccatagattggaaaggtatttgtctgcaaccatgtttgattttgaataatgcagttgaaatcagttccaatttagtctctgaattcagatctgaaagaagatgaggaactctatgaactatcatcgttgcgtaaccaacagttttagcgaacattcctaacctatcatccaacaaaaaggataattgcaaaaatacgtcaaatccgagtgatccaaatagcaaataaaagtttttctgttgtagaatatctaacaacgaattcacagatgtggggaaccaatatttgataccattatccaaaagatttgcttcagaagccaactgagaaatgatatcaataacgcatttcacagataaaacgagctcattaatacttgatctaacatttgattcctttttcaactgttcgtcgacaatctgttgttcttccttgttcaacttctttgaacctttcttggcttggtcctttcttatactttcttgccattttagaatttcataatcctttgaattcttgttgtttaagatagctgattgttttgcagagagtacatcgacgacaagtgtaccttcttttccgttccagatttcaatttcttgttctgtcacagcagatagttttgttgtatccaagtttaattgaatcatgcttgctaccaaaggtgaggtgatctcaggattgataaatgagaggtgagaaatggctttaataatggctcttcttaattctggtgttgttttatcagcgctgttaagcaaatacatcatattgtcgaataatttctcaccgtattgtctcactatttcagaaggatccaactctgcattaaggactaagccagcccatccattcttcaatttaatgccgtctaattgggataatactaacagccttgttaacaaatgtacggagacagacttatccgaaagtttctgagatagggtattgaataaaggtgctgcaaaacaaaatgatatacgcgaaagagtatcattcttttgttttgacaaagtttcaaaagcatcaattattgcattgccgacaaattgtgggttcctgtaaaatgcgcagtttagaagctgtaaagcttgctttctctgttcaaaaggcacttgcgtggatagggtaacatatatccaagaaagaccgtatgactccttgtgtgcttcaaggatgtcatcgattttggaaagtattgcagttgcactcaagtcaataagatgttgaatgtaaacgaaacatccatatgctgaaccttctccattttttaatggattattacagacctccttcagatatgcaagtgtttcgtcttcgagctgaacaatgatatttagttttgcagtgtttaggttgcttaaaaaagaattgtaccatatctttctcaaaggtaacttattctcattaaaaccggactttatggcagcaattgaaacttcgtctgctgtttctaatgaggacaaatggtggaaaaatgctgataacataatattcaatgctgtctcattggattccttcgaaatataagttctcaacccatccacgatttttgaagacacttgattggagaaagttggtacatttattaacaagttggatataataatcttatagtcggtattcaggttggttttcatgttcttaaaagcctcatccacaagtttttgtaaagatgattcgtcacaggaatcagaacatattgacctcaataatgatattagggacttcaaggagctttcacgtacgatatcttttgagcttttgaatgatgtaaaggtttgagtaatgcattttgatgaaacaaataaacccaaactattaactttgttagaattgaacgccgaatagaattcagcagattgggtgaaagatgtttctggtgatcttaaatttgctttctcaaagcttggaatcaaatgcttctgaacttgttcttcagtaacaaatgaatataggaattctttcaggaaaagttccaaacagaatgctgaaggcaactctttggcgaggataacttctttaccgagatactctactaatctttcagtcaactgttccagcgaatgcaaaggaattggtttcttggcttggcactgtaatacagaatgaactagggatcccagagtgataactacaccagtatttggaagcttcaatttcgagtagttgtctaataacaatggaataacatcatcaacaatattagattttgaatctgtagtagattccaggttcacacaactaacgaaactcttaacagattgttggaagacacagagcctcaatctcttacgatgttggttttgcttattcaaatctttcttaaaaggttcatgggtatctaggatagtctcgatagctgctacaagcatcacataagcgtggactatttctttccaataaacattgaagagctcatctgattgttcataaatcaaattcaaaaatttaagcacccattccaataaatttaaataatcagtaacagctttagaagggcagttttgagtgctggcagtcttgataacaaaatcacttatctttttacaatagatggggtcggtttcaaacaattggaccaggattgaagtgactagaacttttgattctttatcctgatataaatcataagtgcttagtacgcaattgaaaatcaattccaacgccgagctatcagttttacttttatcgttggattttaacagttctagggcacttcttaataccggtagcctgactgtcaataaagaagcgtggcagtctctgtaaagaacaggctctaaattttcccaagtagacatccgtaaatactgttgaaaaatgagatgagacttctcaactatgtcgtacttttaataaattaagagtcggtaattttcaatggcttgccgctgataagcgtctaaaacaacattgcttaaatcacaactcatctctgaaataatgaactctgctcttgtttaaaaaactattcaagattttaacatacaaatctgaaaagctttggtgaaagaaaaaaaaagtacaagatcaaaacgtacaaaatgatgtattgtaactaacttgaggctaatactatacttaatataattagtattataatcatcccattgatatattaatgggcatagtagttcgcaagtgatactttctttaatgtgcgatttgtagcagtttcacattcagttatcaattggactttccacttggttggacaacacagagtttgtccagaaaattactatcattttctatgaagaaaagaaggtacgatattatttaactatactgacgctgcatgatagtgactagtatggttgaaacaaaataatactgaaaactttcaattataatacataaagtcatataatgtgtaaggtcaagtctaaacttatcgtgttcaagacttgttactttggttagtcttggaccttccagtgccaatagtcaagtttgagattgtcttggtgatcttttcaaaagatttgagatttggtgacggtgacggtgacggcaggtgcggattactatgtgtgtgaagtggaagatgaggagattgctcttgagattcaggtctcgttattgaacgcaaagttggctgtcttctttgtttcatcaaagtgtcatcaatttcagacatatcttgtgcaagttttttcttgagagttttgatttctttagaaatatgcaagcagtccttgcatctaaccatcaatttcacgtcactcactaagactgcagattcgtaaattagttccatgacataatccacaggtgggagtgaatttggtgaagcaagactatctaaagtggataacttctggttgtggtacggtggatcatttctgactttaccgctaaacaaagacggtttcttcgtatagttagagccagattcagtcgatcctcgagataagggatcaactgaatcctctagttctagtgctcgttctctgaaggacctctctattttgctcttagaaggtagagaaagtccaacacctagatcgtcagagtcagaaggacagcttgaatcgttcgtattagatttttccaaagcgtcatgctctaaaatatctcttacttgatcaagttcgtcatctatgttgtgcatttctgtagttgtatggactgggcgtgctggtgaagaagagcgtgtcaaaatttcaggagaatccacagtagaaacttccttgcttaagctcgatttatgttttggatttgtattgattctttgttgaatatgtgagatcgaagatttcttcccggatacagtgatggtgcttggatagtgggctgatgatattgaatttatgctatcccttggacttccggttatcaccgaaggagtaagggcaggtgcggaagaagaatcaaaggaattcaacttatcaagatgatcttgggtagcactgctactaactgtactcaccgaaaatgctgcagacgcctttcgcaaatgatctatatcaaagtaaccgtcatctatgctgtttaacgatttttcaatagcctggtattcctggtaatttttgtgattttccaaatactgttgcatagcatcttggtcatcttcaaaaagcagtgagactcgattgaggaaagcatcttttagagatttgctaatcacaaacaagctttcctctttcttcccgatgatagaataaaatacttcaagcattagatcgaagagcaatggcacttcataaatcttagccatattcaataatcccaccgccacaggtgatagaggccatttaccatcaatttggccagtgaaaaaaaattccgcgaacgctttaacagtttctgtaggccaaggcatatataatgacctaggtatgaatagaggctcgaaatcaacatcgcccgaattcagagtttgactggtcagactctcagtatttgaagcaaatgagtttcgctcgttttgaggggtagtcatgccatcagcttcgttatctggtttgtgtaaaggatctccgacaaatacctcatcaattctgtttggatagatattctcttgtgatatatgttgagaaatatcatggtgtaaagatgatcttctacttgataatggagaagttgaagttcgatagcgagtatccggaaaaaaatgatccgaaagtcgattgtcaacactaaaatcatgcgatgtatgtgtaggtagcgcagggagcggttcacttgggacaggcagtaatggtggtagcgaaacattcagactcagtatttcttcagatcctggacttctgtaaattgactctcccattctatcgcttgaagagctgacacgagaaattgaacttgacgtagaagctaatgaagctttacgggagcttaatggactattcagcccaaagcttgaatgaagtaaattatcattccccagtgactgagagattctacgagattgagcttggctagatctcaggaaatcgtcagtaaagagagcagagtatgagcttgcagaatttttcctattcgaaggtacagatattttaattggttctgaagtgtcattaggatctaagctaataggtggtggtgttgatctcttagagctttctccgcttggcctgaatggaaccctaaataccatgccaccggatgaactcgttacacctgaagcagcgtttgaatgacgtctctgagaagactgctccgatatttctcccaaagagactatatgatcaggatttactcccaaagaggtaggtaatctgtcgttggcgttagtagcggttgctaagctatctgaatgagaagctatcgaatgagacgagttatcatttgttaatttagatgtgcttggcgtattgaagaataagcaagcggatttcctttccattggaggcgtgctgctttgcacagactgtgcacttggtctgtggcggctaaaaaatgtgtccaaagatccttgtgatgttggcttcttgtcatccttagctatggaagatattgaactagatgtatgcggcgagacgcctaactgccctacgtttcctgaagaaagttttgaaatctgggaaaagctttccggtattttgcgatctgttgaaacttgaacataagcattagccaaaagcatatcgaagtacctaccccatctctttctaagtaaaaaacttggaacggcgacagattcgtcatcttccgttatgaactcaaaatctgctagtagcttgttgtagacttccaaagaatctttacctaaaaccattgaataagatgggaagacggatcttatagatgtgatttcagatggtggggcaacatatctactgtaattttcgaactggtctgtctctgtttgagccaaactgcccggtattttctttgcagaggatgatttagaggatttctgatctctctgagcagaatggaataaattagtgatatgcaacccgaaggaaagcagtctatcaaatttttgtacagagggcaaacagccagaatcatttttggtaccaagaagcaaagccttgtgatgcgattcccataagaacaatttccagaatctatgttttgagctatgtatatcatcgcagttgatactcaatctagtccatttccctgaagtgatgttgtaaaggaaacaatgaaaattgtctgactgtaagtttggatggaaaccagatattatgatgttataaccgaatttatcgccggtgggccattgcaaattataggcgatatgtaatctttttcttcgtctatcgttgtcatcatagacgtgcattctagcaccttcggcatccggcattaaaggtaaggcgaaaagtggattctcttcggagttgaaattgcacttaaactcatgatcatgatcatgagattcctctattgagggagaatacacagccaacgacggcagtttagcctcattttcttcaaccaacaacgaaaagttattttcggagatgagaggaacagatttgcctccgatattaactgttatattatgtaaatcgtcctcttcgtcccacacatccgtttcccaacagtttgtcgataaattgaaaatgtcaatagtttcaactggttggtccaaattattcaaaccacccactataattaacttggtgtccttctttggatccgattcgtacaagacatgcatctgattattgaatcttcttgtcactgacgggtccttactgattaatgaccagactttattatgtaaatccaatttccaaagttcattagtggaaataaactcataatcagattgttctgaaactgtcaaaccaccgaaaacaaagatagcctcttgacaatagcatacagaatgaaataacctctctgtcaaccggggcatcggattacccatgggatcagtttcaggcatagtttctacccgttcccaacgtcttgaaatcaaatctaaaaagaacacttccttacttatccattgtcccaggttttgaaatctatttgagtccttcctttctcgggcaaaatgcataatcaactcttgttgtagattagtagatgttatttcttgtaaattcaaagggattgtcaacccaccgtgcacgaatatccccgatctggcaagtactgttgcagcaccagttcttacgtccaatgtagatcttctgatggagcattcatccatactatccgccgtttgagcatccaattgcggtaggtgtaggttataacaagaacaatttgagggaagaagaaacggcatattctactggaaaaaattttttgaaagtgaagtttgtatggttcttgaatcgatgtgacagctattgaagcagctatttgctatgcgtatcttgtatgctcctggctgactagcagaacccaaaatatcaagaagggccaacaacagaaaaaaggaagatggctcccaattactcaacaaaataaactctgcagttttcgtaccgaaacgtattagcactgatactagactatcgatatcttaaggtacaatctgtggttgatggataatacagcttgttctccctctttttcctttcaccgatgcttttgatcagaatgggattctggtaattcctatttcaaatcctttaaatttcatcatcattttgcagtaaaagaggccaagggtgcagcttttaatagaaaatacagaggagaattaagacagaaaatgataagagataattgattggtgaaaaggtccttgtacttcgaagcatgtttatatatttatttacaacaggtttataaagtggatagtttgttttttttgggtgcgtgcaatgcggccgattcaacaaatcacagataaccaacctagcgttactaaacataaagccaatgggtatttttgaaccaaagtctgggatttcgatactttccacattgatattattgaccatgacgaacatagtgcaaacgagacgattcttgctatcactattagtcttataagtgtaactttagggatcttattgaataaaggtaagataattgaacatgccaacgaattgatcacttgcgggaacatgcaataacctgcaagagacaaatatgacatccaagacattggttcatgtggattcaaaagtttcaaatgtgtggccatagcactgatcaccagccaacaagtgatgaaaaacgaggaaaaccgtccacgacccttggataagaacaacgagtatagtataatgaaacatagaggggcccagaggtcggtaccttggaaaacatgttgatcttgagcacttggtgaacccaatgggaaatgtgggtagactactttctttaatttatcattgatctcatggaaatctcttttgaaagtggacacgatactttcatctaacgttcctctagcagaagtggataaagtggaaccgtaaccgttaccagtctcagtttcaataaaatctggttcaatggtgtccataattggccttactcgctgggatatggtaattaattgtaaaaaaagaataaaatagaggtttttacttataagtcaattcagaaggaaggcaacatgttttttaatcctttgatacaagcgttatttgtatcaatcagagattgttcacgcatagttattcatcatttgagattcgaactgccgagaaagtaacttttttttatttgtcacaacttcggttttctggcaattcgcgcagaccgcctggtccgcccactaagctactgggggttaataagaagcaaggtatttcttagaggcgtttgcccgttatgttgtgagagcctatcacgagacgtttcccaaactgcaagaataaacatccccttcgaccacagtgcacggttccattacgccattccagcctctagcatttcctggttcaatatcctaaaacgacaaccttgggagacgtggtcatcgctcattgttaccctggtttcgttcataacgatttccctctttccctcattttggtctcccctatatcatcactatacatcatttctctaacttatcgggtagggcagaaccaacgaagtgagaacacatccaaaccaacggattctatgccttggtgttgcccgaaatagcaaggtgcggtagcttattgtacgcccttgttttatttactatatgtattttttcatgtatccctaatggagaatgtaacgaactgcagcctgccagctctttacatcttgattctaataataaatatggtaaacgagtggaaagagaagaagagaagagaagagaagagaagaagagaagtaggcaaagaaggcaagggacgtaaatgtcagaggctgcgtgcgcgagctgcggtgcgaaatgctaggcagaatatagacactgctactgctgctgcgcagcagcagtagcagtagtagtagcatctttgccatcgaaacccgacatctctgaaatacctagcaccctcccgctcacaaacaaaaacagaacacaacccattccataactaaatagtacatatacgacacttggcaaggcaacactgggcactagccccatccctagccccagttggttttccagtccaatgcgaagcgataccaagctgacactgcgacttcttttctttttttcccatatgaaggagaacaaaagtgaaaattgagaattgaaaactttcggtaacgctttttggcattacttacaacttgtgttttattcattgggaaaacacggtattttcagtgttttccttcccatttgtttccgggaagatcatcagtattggcgccagctcgagtcaggtcagtgtgtggttattggcgacaggtttgaacacaatacgaaacggtgtagatctcgtttttcgggttattttctaattctattttttttcctttaaaactctgtgtgtgtttttctattattttttctttcaatcaattgattaaaaaaaaaaattaatattattaaagaaagataattataaaacataagagattgagagacttacgttcatacgaaggttagaaagaatacagcagggtctgtttgtttgtagaaattggaagtgagacaatattgcatcttcaaaccagggtaatttctactagtacctttttttatcttttaaagttgcgggctatattctataatctgtttgcttcgttaggaaaaaaaaataaggattaataagaaccaatacttttggataatccaagacacggaagcatcacagttgccatcggttacttcaattattaagaacgtttgatatagtaccgcgataattataaaacaaaggaacaaggaataaaataagaaaaatggatcaacaatcagtagacgttgacgatatcattgatagattgttggaagtgagagggttgaaacctggccatcaggttgacttggaagaacacgagattaggtatttatgttccaaggccagatctattttcatcaagcagccaatcctattggaattggaggcaccaattaagatttgtggtgatatccacggtcaatattatgatttgttacgtcttttcgaatacggtgggttcccaccagaatccaactatctgtttttaggtgattatgtggatcgtggtaaacaatcgctagaaaccatttgtttactgttggcttacaagatcaagtatccggagaatttctttatcttgcgtggtaatcacgaatgtgcatcgatcaatagaatttacgggttttacgacgaatgtaagagacgttataacattaagctttggaaaacttttacggattgtttcaactgtttgcctatcgctgcgattgtcgatgaaaaaatcttttgtatgcatggtggattatccccagatttaaataccatggaacaaatcagacgtgtgatgagacccaccgatatcccagacgtggggttattatgcgatttgttatggtccgatccggataaagatatcgttggatggtcagaaaacgatagaggtgtctcgttcacttttggtcctgacgtagtgagtaggtttttacaaaaacaagatatggaattgatctgtagagcacatcaagtcgtcgaagacggatacgagtttttcagtaaaagacaattggtaacattgttcagtgctccaaactactgtggtgagttcgataacgctggtgctatgatgtctgttgatgaaagtttattatgttcgttccaaatcttgaaaccagcttctaagttattggaacgaaacgtagtgagaagaaagaaatgatgaatttaaatttaaaccttcttaatcatcatcatcatcatcatcatcatcatcatcctcatctctcccccccctttaaacaacgaatcccatctcaaagaaaatccccaatgaaaaaaccagaaaaaaataaactattaaattcaaacataaagtataagatatattactggaaaaacttgctgagctagaacgttttcctttatacctttctaatatattgtaacataatttctttgtcgaatgtcaagcgggctgctacaatttcaatttcaaacctttatctccactttactctcttatcacccttttacacatatcccatcattcatgttattagtatatatatacgcagtgatatatacatatatatatatattctacatattgcaaaggaaaattctgtagattagccgttgagcctttttccatacatcaatcgactaaaccaataacacgtacgttaacatagtgctgtagacacatcgtgttttttagcatagactgaaaattttggaaaaccctcttttttcgatctttctatgtgttatttttttttttttttggcaaaaagttgaagtcgtgttttatttgacgatctgttacttacatgacatttgtattcacacacttcatcgagttgagtcccttcatctttgttattgcactaccctcaaccgtctagtgaaaaacaactagtagccagagagtccttacatataagaatgctattacaatttttggtgttactatttgctggtttgtgtaacgcacacacggtacatctaccagcgtacggtcgtcgttgtttctttgaaaacttgaacaaaggtgacgagctatctgtatctttccaattcggtgatagaaaccctcatggtactgaacaattgactggtgatttcgttctatatgggtctcaaagaagcgaggtcttgaaaactttgagagacgtgtcacatggtgacgtgtttgtgaacgctccatacaccggcaagttccaatactgctttttgaatgaaaactcgaacattgacactaaggacgtgactttcaatgttttcggtgttatttatgtcgatttagatgatccaaacaccagatctttggacggctcagtgagacaattgtccaaactggtcaaagaagtgaagaacgaacaaagttacattattatcagagaaagaactcacagaaacacagcagaatccactaatgaccgtgtcaaatggtggtctgtgttccaattgctcgtcgttgtagtgaattcgttgttccagatctattacttgaagagatttttcgaagtcacttcgtatgtgtaagtaaaacgaaaggcatggctgcatgaagtatatcagatatagtcgtcgtgtatattcaaagtaaaaatatgtgtatatgtatatccaggtttttcctctagcgcataagtatatcatattagaggagtaatccctagggctggaaattgaataaagaaaaaccttcacgtgatcgcctcaatctgctatcatcttcttttttcctcaaatatgtttaagaaagcaccctgtcgaaggagtgtgatgcttggatatgtggctccggttcgaaaccgcacagtcacaccgggtctctttcaaatggaagaggtttcacaatggtatcccaaacaggcgtgaaatgtctcgtagtggttatatgccattacccgcttttcgtgtctggccgcccggtctacgcgttcatttatttgtgtaactgctttggacagctggatctcggttcggttgtcacgtggtcgacgtgtcccaccgttacaaaattgttgcgggttatcctttgtggtggctcggtcgcatgagaagtctgcggttcgaagcccaactggtaacgatttagcatttcaactaatacttgaagctagtttagtgtttaacgttgtaggggagtctcatccagcacaacgaacactgcccgtgacgaggtggtgtggattgcacgtcccgtggttaagcagtgcgtgtgggttcagaggcagacatacactgtccttcattttttttggctgtacttagaagtatgttatatggctagcgtcgtgcactgattcatcattcaacaaatactccagcgaagctgcactgtttgtctagtttaaatttgaactatctcactatgttaaaaaattgtgaattgcacataactacaacaacttctgtttccccggttcatactatacacagccatttagcattccaaaagcatacctccaatgaacgcaaacgtatatgaagcaagccataacctcgtcaaaggtccaaatggatcaattctttcaccggatgaatgccttggtttaaggttgaaccatatcgttccaatcccattattgactagagacgaattacaaacgagattacccactattgatacgaaagtggtgcattactttttgacacaactcatcttacaaaggtacccgcatctagtgaaacgattcgatgagaccagtctcatcacaattagttggttattggagaaatggatcgaagattacttagtgctgccggaaactggatccgtgtctgaaggggtttctcaacagattagcaaggatataaattacagatactcaccagctgatatttagaggtaatactacttagtgtgtgtgttttacatgccttccattgtgtacctgatccagtctctctatttacataccacgtgacttgaaaattttccgagactttgaagaaaagaaaaagtgaaaattagaatccgttgatgatgcgatgagatgagcattgtttcctgtcagatacggtcttgtgtgtcttgctgttgggtttattcggttctctcttaccagaactagtgcaacatacaagcaggagaaatggctagaagaaagaatcaaaagaagggaccaaaaaagacttttggtactcgtgatgactccaacaaccaaaagaattggactgaattagtgaaggaaaacgagaaatgggaaacttactacaaggatttaggtgtaatcccagttgaagaatgggaccagtttaagaagacttgccagtcgcaattacctttaacttttagaatcactggttctcgtaaacattctaaagaagtactacaactgttccaagaacaccatctacccaatttgaccaacgttacttgggaaaatgaagtggttaagccaccaatggctttgccatggtacccggaacatcttggctggcaattagatgtttctaagagtgttatcagaaaaaatgaacagtttgctcgtatgcaaagattccttgttgttgaaaacgctgttggtaacatttccagacaagaagctgtctccatgattccacctattgtgttggatgttaagcctcaccattatgttttggatatgtgtgctgcccctggttctaagactgcacagttgattgaagctttacatgccgaatctgatgaaccttctgggtttgtcatagctaacgatgcagactataagagatctcatatgttggtgcaccaattgaaacgtttgaattctgctaacttgatggtcgttaaccatgatgctcaattcttcccacgtatcaaagtggattccaccgaaggttctaaaggtcctcagttcttgaaattcgacagagttttatgtgacgttccatgttctggtgacggtactatgagaaagaacgtcaacgtttggaaggattggaacactggatctggtctaggtttacacattgtgcaattgaatatcttggaaagaggtctaaatttgttgaaagaaggtggtaaacttgtatactccacttgttctttgaatccaattgaaaacgaagcagttattgctgccgctttgagaaggtggggtgataaggtaagattggtcaactgtgatgatcaattgccaggtttagtcagatctaagggtatcactgaatggaaggtatacgacaaacaattccaagttagagaaaaaggacatgaaaactgtttggattcatggttcccaccaactgcagaagaggttgaaaaattccatttggaaaactgtatgagagtgtaccaacatcaacagaatacaggtgggttctttatcaccgttttcgagaagatcgatacatcaactgctgaaactccggtaccagcttctgaaactgctgctgctgtagaagaacaagcccaagaacctgaactaaaaaaggctaaaatcgatacatcctctactgcctctcacattcaaaagaaggaaaaactacctcgtgatgccaatgaagaaccatttgtgttcgtggatccaaaccatccagcattagccaaatgttgggagttctacggtattgatgacaaatttgataagtccacttgtttggttcgtaacgctactggtgaaccaactagaactatctaccacgtcgctactccattgaaacaattgattgtaaacaatgaagatagactaaagattgtttactccggtgtaaaactgtttgtttcccaaaggtcagacattgattgtgcttggagaattcaatccgaatccttaccaatcatgaaacaacatatgaactctgccagaatcgtcccaggtaacatggaaattctaaagaagttgttaactgaagctttcccaagatacgaagacttaacagcggacaacgtcgatccagaattcatttccaagactcaaaaactgagtgcaggatgcactttcattaaagtcgatagaaatgatccatccaaggaagatttgtttttaccagtttggaacggatcaaaatgtatcaacttgatggtttgtaaagaagatgttcacgaattgttgtacagaattttcggcatcgaaacaaccagcaaacaaaatccaaaggctgatcatatggccaagaaggcccaagaagcagctgacgcatcagctaactcttcgaaggaagagacttctgagaaagaagaagtacctgctgtaactgtcactgaaacatccacggctgaataagtttcttcactccacattatcagttatagacttctacatgaaattataaaagcggtattcctttgaaggttgaagtaatcattatttaagtctattagttacaaatttgtatattatgctaatataagcgatgtagtactgcatctataatggaaaaaatgggaacggtatattgttgttctgagcttatagaattgttttcttccgttggaaatgttgaatcttgatttcacattgttcccatagtataaacagcgaaagatctttgtagttggcgacgtacactaatcttttgtgcacccacaaaactgtccactgttactttaattgctctgtctaaatcccatgaggaaacgaattctgataatctcattttcgcgaaggcttcagcaattcttaagatagattccaaatgacgaacggtgatcgggaatgaaccagtagtgacactctctcgtctcaaatcagcataaaccctactcactttgtccatatccatttgatgtaacttagggtaaactttagttcttgcgtaatgaatatacttcattagcatatgctgagatatgggcgaaatttcttcttctcttttacgaaggttctgcaagcgtctttgtttggcagataacggagtttcttcatcaccctccccattaggattttccgttggaacgttaccatcatcaaaatcatccagatccttgtctggatgagacctgatatgtgaatcaacgacgaaagatgctagccgattatcactttcttcatcaaccaaatctcttaccacgcagaggatatcgaatcttgacaaaattggttcagtcaaattgacattttgtgataacggaagagtagagttgtaacgaccaccgatcgggttggcggcagctaaaatagagcatctggcttgtaacgtggtaacgatacctgccttagagatggatatactttgctgttccattgcttcgtgaatagaagtacgatcctgatcgttcatcttatcgaattcatcaatcaaacaaacacccttatccgcaagcactaacgcaccaccttcaagagtccactctttagttatttggtccttcctgacagaagctgtcaaaccgactgcagaagcaccttgacctgtagcgaagacagctctgttggcagttttttccacgtatttcaaaatttgggacttggcagtacctggatcaccgagaagtagaatgtttatgtcaccacggatggaatgcttaccgttaatgtttttaggaacacctccgaataaagaacatgcaattgctgtcttgatatccctgtgcccataaatagatggagccattgatgaaatgattttatcgatgattcctctgtcacgagacatctttctgaattcacgctcttcgtcttctgtccaactgaaggcatccagcccttcgtgttcatcaccatcatgcaatccgccttctcttctcttcactgaattggcttccagtactgttgcgaaaacggggaacccgttctttgcattcaaattaccgtcatatgtgttcttatagattcctgtcacttcgacttcttcaccaggttttgcgatatcaaccaagtcccacaacaaaatgacttctctgtgacgtggtaatctaccggctggaacagaccctggtgattcttggatggtgattctttggtaattacggtacagagttttttccatattaattctgaagggacccttagatctacaatttgtgcagaacgagattttaatttcttcatttgaatcctgatagtaaggcccaagtgtggcaccacatttcaaacagttgaatttaacgtatttaagttgtgggaagacaccagttcttcttgtcacgacaccactaactctaactaaagaattcaaatgagtttcacgtaaagcacgtaagttcaatatactagggaaatccgagattcttacgtgaatttccgagtgaatacgagtataatcgggatagtgtagttgtgtagcttccatagccactgtatcaaatattttcaacatttcttcgggagatttggctaaaaatagggctagaatggccttggattctaccaaatgtctataattaacttccaaggattcagagttcatttcaccgagagttctgatacgagcaccgtaaacggatttacctgactcatcagtatattcaagcaaaaacgatttcaactctctggcaatagtacgtgatacattcggttgagtgatccattcagaataacttgatgccttcacatctgccaaagattccaacgagagctcatctgccaacggatctatatccatatctgataacaaatcatcatctgcttcttcgtattgacgtcttctacgtctcctctgtactggaagacccatagcatccaaattatgcgcaccagctccttcgccatcatcatcatcaaggtatgctgtgttcctatgcaccaaacgatctctctcgttcaattgtgcatcgattcttctacgctcagcgagcgacaactcttgctgctcctggtcgtcgactcctcttctttcatacgtatcatgttctgtgtttgaagcgtaatcacggtacatatcatcacccatcaaatcgacttcattcattctttcttccacatcttcaagatcctcttgaacattgacagcttcatctccatcgttatctggattctcaaaatctatctcatctggagatccaagcgggtcttcaaactgtggagaactagggatgttagcgccaccttcacggggttgtgtagacaaagaatcatcctcatcctcatcatcatcagctcttcttcttctcctccttccgttatttatttcatcattatcagacatcttgaaacactttcaaaaacagcaattaataatcttcaattatcgcactaccaaatccgatcacacaattgtcttcctgatgcttcgatgacctacttgttacactttgtttcagaccattgggatctaaagctatcttaagatcttaacgttttttccggcttttttcttcagttgaatgtacgaaaatgatctttaattgaaacaataacatttcctaaaatggtgttttgcaacgatctgaccattgtagagcgttggggctaataatacagcaatggcaatattccaataacaccaatcggtagttctcacctcttttagctttgcaatctacatttgattagtataatttctttattatgatgcgtggatcacgtgataatcacatgggatcatacgcttaaaaaccgtacttatagctccaatcacacgatgaagcaacacaattgcaggtaaagtatggatgttgaagctctggaatgatgtgatgcattttgtgccccatattagatcgatttccatccggtaaccgtccaaatgtgtcgatattgacgtaaaatcatacggaatattgattcatcgacatggaaaatctcttactatcaatgaaatatccccaaatttaaacataaggaacacgtcaagttaaaggcaaaaagggtaccttcattcacgcatttcttactacaaggtgagttctggcacttaaagatagtcttgttggtgttagggaatgagcgagattagcgttaaagaatatgtgaagcgacaggaggaactggaagatgaagcaaataaactgatgccatatgatccaagccattgcacttattccatgggcccaattcgacagccaatattcgcatgtcgtacttgcaacagtataggagtgtgctattcatgctctattcagtgtcacagtacctgtgacttggtggaacttttcgataagaggaatttcagttgcgattgcggtacagaaaggcagtttgaacacggtgagaagttcacaccttgtaatataagaaagaatactacaccagatataccagacatgagtaacaggtatggccagaatttcaaagggttattttgctcttgccatagagagtatgacccgaatacaacgacaacgatgttacaatgcgtccttggcttggagtgcaatgaggactggtttcatgatcactgcattctagggatagaagaaaacccagacccggttacagaagacagaaagctaccaggattccctgaactgtcaagtttcgaaggatttatctcatgggtttgtattgacaagtacagctcgatatttgaaaagcttttatcacacgaagcgtgtgataaaatcatagcacataaagtgtacaggagagatctggtatcggatcagaactccgagggaatgacattggaaagtaccaagaaaagagggctagaagaaatggaaaactcttcgggttcatattcattattcttgaaagaaggatatagggaagaatttaaacgattaagggattcacttccagaaggtgactccttgaaaagctttttcatgcacacagcaccattcctcacttgtgaagagaaagtttatgaacccccggaggaacaagagcaaggatctcttgtagaaatgggagaaacggccctagctcaaaacttgtctcatcagcaaactctagccagtctagtcgctttccagcaaataaaatcaaaactaacagatttcctacgaccatttgcggaaaacgataaggtcgttagtgaatctgatatcaagcagttttttgatactcagaaaaaatgaactcttgttacgacatttaatcatcataaactttaaatgtggatatgttatatacattgctacatttagaagaatttattgtcaataagagggatatctcgagcttctactctaaacttttcatttacacatgtatgtattcaaaaaggtgttagttttatataacatatgagataacttgcatatccgaatagacttcattttagtagatataagagtttttcaaagtgaattgtctatggtgccacaatgatggccttcaattcagtgtaatcatcgataccatacttagaaccttctttacctaaacctgaattcttaacaccaccgaaaggtactgcaggttcactgatttctccagtgttgacaccaaccataccaacatttagtttctctgcggcatcaaaaatggtgctaatattttgactgtagaagtagcctgctaaaccgacatccgtgtcattagcacgtttgatgacttcatccacatccttaaacttaattaatggagcaacaggtccaaagatttcttcataaaatatatccatggactcggttacattaccaagtactgttggttggtagaataatggacctaaagaactagctcttgagccacctatcaagacgtctgctcccttcgtttttgcatcctgaactaaagatgcgactttgtcaatggatttgtcatggatcaatggaccgtgagtgacaccgtcttggaacccatcgcctaatttaaaggttttgtcgatcttatcaaccaacctcttactgaattcatcgtaaagatcttcatgcacaaagattctgtttgcacagatacaagtttgtccggattgtctgaatttacatccgattattccatctaaggcacggtctaagtcagcgtccttgaagacgatatatggtgcattaccccccaattccatagagaatttcttgatattctttcccttgcttgattgtcccattaacaattgaccgattttagttgagccagtgaaagtgatcttcttgaccaattcatgttcgcaaacgtattcacctatttcacttgtgtgattagttggtaagatattgcatacacctgcaggaagaccggctttctctgcgatcacccctaacgccaatgcactcaacggagtttcatgagcaggtttgatgacacatgtattaccagtagcaatgactggtgctaactttctagcaatcattgcgctagggaaattccacggagttagaataccaataacacccaatggttgtcttattgtaaagatcttttggtcactggatacagcacttggaataatatctccataaattcttggagcctcttcagcaaaccatttgaagaacattgcagagtacacaatctcacctagtgagtccttgtacggtttaccgttctccaaagttaagattttggctagatcctgcttgttctctagcatcaagttgtatatattgtccaagatctgcgcgcgctctctgacgttggtctgtctgaacgtcccgaatgcatcatgggcaatttcgatagccttgttaaaatctgaaacaccgcagttcgtaacctcacggatcgtatcaccggtggagggattggttacagcaaacttgtcgtcagtttctgtccatttaccgttgataaaggccttggtttgtatcaaataatcgttctcaattttagaagacatctttcttaataggtttagcgttcttagggtattcgagttgcggaacatcttaactcttggaaataacacactcagcgacttgacaatttgttagccattaggatcgccgtttatatacaaagttctgctcttattgcttcatgcttgctcttaatagcaaaaagtgcgtcatattaaatgttatataatatccattatgtagtgtagagatgatacactatttaaggttggaaagaggagacggagccgaagttaacatcagcatgcatcaaattctgataattcttatttaatcttgctatgctcggtctatatattgctgtataatcactacattttgctatgccctttgcttaaggcacctaaatattaccaaatcctctttgataccatcttgtatctttcaacggactctagcgatttaggatgcttcagatctctcttggttctttgctcgttgaggctaggtgggatgcttgccttcttttcaaaagcagcgagttttggcgatcctggtggtgtaattgttggtgaataagttcttgtctggctagagtgtgtcattttgcgggcatcctcatccatcattcctcttccagcagagagatggccattgatatacaaaggatctgggtgcaagctggcttgtttgttttggatatgtaacgtccatctcaacagtattgcttgaagtgttagctttgtgagtagagcccataggaatccaaatattatcagaacagtggaccagatgatattattcttgatcgtttgcctgatggcaggccataccagtactaggaaggctactattagtggcgggaacggcaaacctaacctcttttggaattggatactgttggataggttgtccttggaaagaatttgcaaatacctttcatagatatgcgctctgattctgttgaatttgataatatatgcgtgcttgatccaatccactatcaattcacttccaattactgtgacaatcggccctataaatataccaactatcaaggactgtgtagaatgaacattccatgagtgtggtaaaacatcgcgcaagctctttcttgctacgataaagtttctcactgcaatgaccgttagaaatacgatcaactggaatctttccacgacgtcagccatagtcaattggaacaatccttctttatcaattctcttgaaaactgcagattttaactctgaaaactgcattgacaacagtagcgtccataaggagttagaatacgagtttaccgcaacgttcatggcaagaatctggtagatgtatatcaacgcgtggaaacttaaacataaacaacatgcaatatatagcattaccatctctgtcttatgtttggcactcttcttgagcatgataattgaatatagatcaaggccaacacttgataagagcttttctgtcatctcaagaacctgaaatatcatgtatagtttaatagcattttggcccttaattttatgatatattcttgaggtgtcaaggacattcaatatcgaacagggtccaagaatcatcgcagtagtaagaagctcttgtcgtattcttttaggaccatctcgtttcaccactaatacatggaataccctaagtggtataatggtaaagtaatacaagaagcagttcaaacaagtcaatatcgcaaagacaaagaattgctcgacttggaatggtaccctcagtatgttcgcaatctgctccagatcatattcaacagacttctcactctgatcacatggttcctcttcgaataccttggctgtttggggaagaatctcctggtatataaagttctttatcgatgatgacaccgtattcacgtcttgttcaaccgatacccttctcccagcaccagaactgctttccttagacctcgcctttcgccttttgaggtgggcttcagaatcctgtgaactcatttgttgaggcacaactgaccggttagtgctaaggaccttacttcgtcatggatatttctttcttctgttgttgttgtctgctcgaattcgatctacattgaattaaaataaagtccttgcttaaatcacatcgaagggttgatagtgccaaagtaaagaaggtaaacttaagaaaagcacatgaataagggacctcatacagctgcttgaccaactacgaccgtgaaataatttaccaaaataattagactatagcaatggctaccattgaagaaatcaaagaggttgtattaaaaccctatacaaaccatcgacaattgaccataagggaagtggaaactataagtatcaatttaatagacttattgattacaaaagacgtgaaagatgcaaggacgatgaaatacatttcaaggttccttaccaaacaggattatgcggatctagtccaagaaaggaacttggtgaagcgttgtggatatccactctgtagcaaaagccaggcgagagtacgtgatcccttcgcagatgtacagatgaccaatttcttaagacaaaataacccatatgcataccttacagaatactgtactaaggctcattttagatgttcacagttttaccagtttcagctctcagacgaggctttgtttgctagggtcggtgtacatcttgacgattatgagccacctagtgagatacaattgctcgaagaagtactagctagagagtctgatgttaagcagatgattcgtggtatgactgatttgaaactcgcggacgatgatagtagagaggaaatggaaagggatatcagtgacatgttagctgatattaagatcgtagagatcaacgagccaaatatcattggagatttaggacgagatagatgaaatgacagaatgatgacaagtacaaacatatttgaggtagagcattttgactctataactcaaaatatatggacaatcctgcattatatagtcatacataaaatagttttatttacgatttaactttcactaattgatctggtctaaggaacctccatttaacaagcaaagcacctaaatttttctcttcggtaaatgggtttgtcgttggtaactctgctttcaagcccaagaatcgttcaagcctttttttataaagtctttggttcagttgtttataatattcatattgttttccgtcaattaagtgatctctactttcggtgaatttacgctgtgtattagcatttatccggttgagaatgtccatatcttcgaggattggttttatccagtcgatgaacactgcagggatgtcattggacttaccactctttatctgtgtcacgacgtcattgaattttcgtgaacatggttgtttgtgaatcaatgtatattcccattgtgcttcttgaaatgcatagaaaagtttggattcacactccctaaatctatcgagattatcttgagctctaagccgtgccttaattatgattcctgtcaatttcttagactggcgtgccttcctattgaatggagatcgtatgaaccaaattcgggattggccagcgttggtgtagttaatagaaactttaggggggcccttggcaatgcggtactcaatcctgtacaaaattttacagtatctctcgtggattgcaagaggtctgagtagctcgtcgatatgtttacgaggtatcgttttagtcggaccatatattttataatatctaagaaggtagcggtataaatcaccatcaccaggaataggtgctaatcgcttctttttttcccttcgactctcatcccccatattttcagttaccaccacaccagaaattggtttgttcgcttgctgcaacggttctggagcaggctcgatctgctctgtgtatttgttctttagagcaactagcttgattatatcatcgccgacaatatacttattcagatgagagagatcctccaataatccacgtacgtaccagccagctttatgatttctgttacgtcgtactgcttgtctcaatgtgttccaaagctcaatctggagattatcagtgggtacgttggccctaatgtttcgtaatgaatatctgtaccattccaatacgtgtttcctatgacttcctatctctccaaatggtcgtaccattgatataattctgctttgtagagcttcatcaatttgataagattgagtaggatgtaccttgaattcttcctgttttcaactactcatctattcatgtcatcgcatctcatctcatcttgacaatagtcataaactttgaaaacatacagatcagcgtgctatacatgcttcgtatggtgccgtgtgagacgtcattttacagcaaagtggtttcgtggtctagtcggttatggcatctgcttaacacgcagaacgtccccagttcgatcctgggcgaaatcattttctttttaattttttttttttgcctcctgtgtactttaagcaacaaatcagcaacaaattctactaccaagctacacacaatattgtttgatttgtaaacattgtggttgccaagtttcggttgaatgactagtagagcattatctctatcctcgaactccttttctcattttatcacttctaaagtctctttatgttccataatgatgcaaaaccataacaatctccgctatattcaaagtaacagtgaggaagaaaacgacaattatctaaatcagttgtggtacgtgattattcatgacactcactataaatcatccgagctacgcgattactgtttctagtatttctccagccctgttgcgtgctgatcacttcagagaacagtcaaactcccaaaatttgacctaaatggcttcgtggtctagaggtatgatttccgcttagggtgcgggaggtcccgggttcgattcccggcggagcccctgtgtgttaaacactttttatttttttttaatttaatcaattaattggtttttgggcttcgcgaagcccaaaatcaaaaacattcggaacctcccgcgtgcgcacgcgcacgcgcttgctgttgaccaatcgcactttaaagtgcgattgtcaacacacgcatttcgtgcgaaaagaccaaccaacataccacgcgatccatgcttcacaacttttaccaatgtcccactgacgaaaggaaaaaaaggggaaacccagcgaacccatgtccctatgtctcgcttcatgtcccttccccgattaattcttatcaaggagccgacaaggatggctgaaatgtctaaattttgaaatatgaatactaatttaaaaaaaaaagaagctaaagcttgtaagcaaagcgagaatctttcactggattacagagatatgatggggaaacatactccgtgcgggctgcaaagagtgaatagggtaaaaaaaaagaactcaattcaacggagttgagttcgaactttaaaaatttgaccattagcccctgtgatccaatagcatgtagcgtgtaaactccgtaggataatggtctaatggttttcgacccggtcattccagtgtggatcttttacaaaacagcagttgtttccagggatgttgagttacgttgtatctttcgataatatccctataattctcggtatgtatttcattttttttttgatcattcatttttttccttcattgtttacgttattttgactgaggaaaacaactggctcaaaaatgagtgacaagatcattcaaattcgttagtagtggtgataggtttcagtttattgttttgtaaaaaagagacttgtttcaattgaatataaaagggggcctgtaatttctttaaaaaaagttctgctatgacggtagtttggggggagcattggttttgatatcaatttctgttggttttaggctcaattaagtaacttttttttgagtgggaagaacctgtatttagatatcacacatagatcccacgcaactctaaaaaaaaaaaaaatgtctactactatgttatctactagaaacgcgctagcgcgcggtttgctacgcaccagcggcggtgccgctggtgcttcaagaaacaacttgttgttgtctcttgttgcatctcgttattacagtaacggtgaaaaaacgttgaagcaaaggtttgctgaaattttcccagaaaaggccgaagaaattaagcgcctaaagaaggaacacggtaaaaccgtaattggtgaagtgttgttggaacaagcttacggtggtatgcgtggtatcaagggtcttgtttgggaaggttccgttttggacccagaagaaggtattagattcagaggtcgtaccattccagatatccaaaaggaattgccaaaggcagccgatggtgaagaaccattgccagaagctatcttttggttgcttttgaccggtgaagttccaactgaaactcaagttaaggctttgtcagcagatttggcttctagatctgagttgccagctcatgttgagtctctattggataacttaccaaaggatttgcatccaatggctcaattctcgatggcagttactgcattggaatcagaatccaaatttgccaaggcttacgctcaaggtgtttctaagaaggattactggaactatacttttgaagattctttggatctattgggtaagttgccagttatcgcctccaagatttaccgtaacgttttcaaagacggtaagatcacttccattgatcaaaacgccgattacggtaagaacttggcccatctattgggttaccaaaacaaagagtttgtcgacttgatgagattgtacttgaccatccattctgaccatgaaggtggtaacgtttcagctcacactacccatttggttggttctgcattgtcctctccatatttatccttgtccgctggtttgaacgggttggctggtccattgcacggacgtgcaaaccaagaagtcttggaatggttgttcaagttgagagaggaagttaagggagattactctccagctaccatcgagaaatacttgtgggatactttaaactctggtcgtgttgttccaggttatggtcacgccgtcttgagaaagactgatccacgttacactgctcaacgtgaattcgctttgaaacatttcccagattacgaattgttcaaattggtttctaccatctacgaagtcgctccaaaagtcttgaccaagcacggtaagaccaagaacccatggccaaatgtggactcccactctggtgtcctattgcaatactacggtttgactgaagcttcattctacacagttctattcggtgttgctagagctttcggtgtcttgcctcaattgatcatcgacagagccgttggtcaaccaatcgaaagaccaaagtccttctccaccgaaaagtacatcgaactagttcaatccatcaacgctaagaaatagattgtccgcccgacttaatgagattatgatttcatcttcaacagaataaacagaaacaaaaaaacccacatataaaaaacattcacaacttacacactcacaatcaacctcaccctcacaatcacaatcacaatcatacacacacacacacacacacacacacacacacactcacacacacacacactcacctttatatttctgatcatttttctatttttacataccaaattttaacttaaacttatattaaatgcgtatctcactcaattcctgtctctctctacttagtaagcgttactagtaaatcagtaagtattatacagtttatagggactcatgatatgacaaattgtgacccaagcaagaaaaggatcccccgccatatgtgattacatacaccattggtggtcttgaacttagccttacaaattgtttgataatgatactctacaaagatgacaaaaagaagactaataaaatgaataagtttgttttttttccttttgggtaaagaactgaggaaatgcacagaaacagccgaacctttttctttgttgtctttttttttttttaacggccattcgagccattgaaattttatgtttagaattaaaggatgttttttaagcaaaaggataaataaaggaacattgacccttcgatagcactagctttcttgagatttgtttaacagtagccttttcttctctgtaccgtgatatttcattgtacttattagtttagtatactaagtcaaggttttttttatttagcaaggcattacagttaataaaaactggagaataaggtaataggggaaaatggttaaagttgctattattacatattcgttatatggtcatattgattctttggctgttaaagttaaggaaggtgtggaaaaggctggtggccaagccgatatctttagagtggaagagactttatctgaggaattgttaactacacttgccgcaccagaaaagccagattatccagtggccacgttgcaaactttagaagaatatgacgcattcttgttcggtattccaactagatacggaaacgttcctcaacaatggtccactttctgggatactacaggtgggttgtggcaaaagggctctttgaatggtaaaccagccggtatctttgtttctactgcttcgccaggtggtggacaagagacaacgatcagaaattcattgtcttatttggtccaccacggtatgattttcgttccattgggttacaagaatgcctttgccgagttgtccaatactgacgaagttcatggtggttctgcttggggtgcaggtgtcattgccgcaggcgatggttctagaactgcttctgacttggaattaaaggttgctgaaattcagggtcaaactttctatgaagtcgctaagaaggtcgccagaaagtcttcttctggtaccgctactgctgacgcaaagaagaaaactgctgcaaccgctgaaagaaagtctgagaagcctgccgcagctgaaaagaagaagagcgactcttgttgtactattatgtaaaaacacttaatatcccttgccataaaataaaagaacacaaactaatcaataggtaataatataatataacgactatttttttggtcttttataatctatatatgccgaaaggtatgtatctcttttgtcaatcattcatcgaaggaaaatccgaatgaaaatccctccgaagattcttttgttagctgattccatgcctctgattcacgaacattagcattagattgttcctttgacagctgttctaattcaattgatttcattttcactaaaaactcgtctagtttgtcaccgtatttggatttcgatattaattcaacgaaaaattcgtaaatcggtggatgtatgtctttagtgtcaagtacaccgcagtcttcgttgtcaatcttgtatttatcgctgttctgtatgaagctgtgcaaagcatcaagcctctcgttttgtgattgatcgtctctctcctgtgtatccaagaaaactctcacagactctacgaaatctttcaagtggaaccccgagatttgcgcaggcttgttcttgaagaaattcatcacttttggaacgattggttcaggtacaaaattctctgttaatgcaactgaatctgttaaatttatcaccgaatgccaccatcctgagggcacgtatatacattctccagggaaagtgacacagatctgacaccgtccctcttgtgccaacttcactgcatcgttataatatcccgagataatccactctgctataccgacaggcgatgtaacttcttcttcttctttatctgtcatcacaccgggtgggttttctccaggtggtaacattacccatagtttcatgccgctcaagcctgtattccatgcagaagtgtgattcggatccttatggaaagtggatccgcttcttgctggaccggcaattagccatctgtgatcaggtcgacatttgattcctttttcttggaacaatttgaagaaatcgttatggtagatggaaggtggagcatactctttactcatcagctttaaggcagtgctattacaatcgaaaaggtacaaaggcgactcatctctattttctctgaaatagtaggaatataatgagaggtcccatttcactgcttcttggcggaatatttcatggggatatctctcgactaaatcgtccaacgtccatcttggccatcttggtttcccctccgaggtaataccatctttgttttgaagaatgaaaggcttattgataaactcttcatggaaagttgccacatcaaattctgtctcttgcattctaggtactccaaactctgtgttcagacatgtacctaactcatacgaactcgtttcgaattcaatcacttttttgaaaagctctgtataatcgatctgagaacattgatatggtctatataaggtgtcagagaacagaatattatgacactgtatcaatgcttcttggtctactttcaagatggtctttctccacgagcccctccaccttgaacatccaaacggcgaaatacgctcttgctctggactttccgattccaacttcaagtactccttggtataaatctttctccatagttcctcatcgtaggtgtacgcgtaaaggatcctagaactacatccgaggttctgcaagtcatttggatcatcgatatatgcgagtatttcgattataagatcttctggtagcactgacagagagcctaacagctttttcctaagctttctagtttcctgaggatctgcaccctctaataaagaattcccgctaggttttacccctaacggatgcgttgggatgctggtaaatacaggaatcctgtaatttggcacctttttcactttcttgaactgtcgtgtcgttgtcatactgtatggaaaattgtcagccttattgtcaatttaaagtgaaacaaaacaaaacaaccaatatcagaccaaactgttaaactgatgccagttttcaggtcctgcttaatcctgtatcgtgtattcgcacctcatctcatctcatcgctacttcaaatcttttcactcatgatttttttcttttcaatctgatcttttctcgactgattttcacgcctttaggcctggcatcaagcctgctctaggaaaatttttgtatgtgatttgattctatgtagagttgattgtgatgagataatgaatctaactattactacaggaggtgaatgctgacactgaaataacctgctaaaatctgggacgtgtattcgacatatatatacaaggtgatggggggattgaacttgataaaaggttgtttttttttagtcatttccgccgatgtgttattttgtactggattcaatgagaagagggtttaatgtgatccttctttcttctcagatctctccactggcagagttttcatacgtctctccaaataagcatccttgtccttcagtttctttgtgtattcagtttcttttctaccaggatacaagatacgcttgtccaattcagacaactcttgttcttgaataggctccacttgttcaacgttagtgtgagccttccagatgtgacggatttcacccacacaatgcatacatagcgtatgtgccttcttgtaatgcccacatgaagggcatttgttcaaatggttgatcattttcagctgtttgtctccaggcgcatataacttttgtctcttcttctgatgcgacactttcttcttgggcacagctagaaggatcccgttattcgtaaagtaatccgcttgaggtgaagacttttcacgttggtttctttcaagcaattccagcagtttctgtggcaatgcagtaccagctgctggagtgctccaacgaggcaatattgatgtcgctgtttccagcaacactctgctaaaagattccgttacagctccaaaagacatcctctaattattttcgctgctggtatgatactatgatgaagaggagaaaggataagttcaatcgatagggacagatactagtttctctaggtcgctcgtctaactctgtttgaacttcgtcaattcaaattggtattgacgaattggattataagaaagaattttcaacattaccctgatttggtgatgatctgtgtccctttttcgatttcgatgaaaaagacgaaaaatcacaaaaactaaaaatggaactcgaaacgaaataagtgtgtcaacaaaatataagtaaggaatcagatcttgtattctttagaataagtaagattgtgattacttttttttgacgtttctgtggttaattgctactcattgtttgaatttttgttattgcggttaattgtttttataacttagaggtttttcattattttaacttccaaacactaaaacacgtaaagctttgatcatttggatttgacttatatacatctctactacgcgaaaggaattattaaaggtaaaatacacgcataaacaaaaacaatggcatctagtactgctgcagctggtatgacttcttcttctgatgggttggctttggtaaatccatcttcttatgttgggtttgattcgattacttcacagattgaacatcgtttgttgaagagaggatttcaattcaacgttatggtcgttggacattctggtctgggtaagagtactttgatcaacactttgtttgcatctcacttggttgattcttctactggtaaggacatcactcaggaaccaattagtaagaccaccgagatcaaggtttcaacacattctttattggaagaccgtgtacgtttgaacgtgaacgtgattgacactccaggttttggtgaccagataaataacgacaaagtttgggaacctattgtcaagtacatcaaggagcaacactctcaatatttacgtaaagagttgactgctcaacgtgaaagacacattgtagacactcgagtacatgcagtgttatatttcatccaacctaacggtaagggtctaacagaacttgacgttgctgctttgaagagattgacagaaatcgctaatgttatcccggtgatcgctaaagctgatactttgacgttgaatgagagagctaacttcagaaacatcttacaagaagaatttaaaaagtacaatttcagaatctatccatatgatttagacgatctgaccgatgaagaagtggaactgaataaaagtataagatctattattccatttgccgttgtaggatctgaaaaggagattacagtgaacggtgaactagtaagaggaagaaaaactcgttggggtgccatcaatgtcgaagacatcaaccaatgtgagttcgtatatttaagagaatttttgatcaggacacacttgcaagatttgattgagactacagctttgatccactacgaaagtttcagatccaagcaattgattgctttgaaggagaacgccaacgctagaacttctgcacacatgtctcagacatcaacaacaatgctgcgttaataggtggaaaaaagagccgggaagacttctagaagaaacggcgtctttatttcaaaaaaatgtagcgttttaccggtacgcaagagctgtgccaattattttttttgtgttcttcactggtttgaatcctgccctagtaaaatgtcgcttcatttccatatatcttattgataattggtaatgtctctctatttctacttgtcaaacgtctcttaatctcttttttatatatcacattctctttttaggatttataaaccccattagttaactataatactacatcacgtataaccaactggtaattaaagtctaagaaattggacggtgctgttgtcctcccatttttgtactgagcagatgtatgcgaataaattagtgtagacaagctccagagtaatctacaatgtatcatcactgcatattagtgtctacatgaagacattcagtgtttaaattttattccagatactaaaatgttctattttgtcatatcctctggaatcttttttttattgtgctcttctacgacttctgagtagaatggagtctacagacatttggcaggagtttatggaagtccttaatgtctttattctgcttagagcgtttcatataaaattcactatcaatgtattttctgcgcatggaaaaacgaataataaagcatcggacaccgtccaaaactcgatatacgctttcaatatttgtatgattggtttgggcatgcaaagatatgggcctttcacaaagtgatattttggtcatctactagttttgacaacttgggaaaatgttaaaactaggatgctgattcagcctttccagtgcacatcgatgttctctgaaaataataaatagagttagcaactatccttggggaaagaactccagtaaaatattctgcaggatgcattcatgactcttgtaatccatactaggtttaacgaaatatttgctgttgatcacattctagtagtgagtgaattacaaatttcttgtgcgctgcaatattcatataacgagtaaaatgtcttgaaggcaaagcaagttattacactgcactaaagcatagatcaaacagtccacagatccgataacgaattcctttaacgctctatcatttctagccgtcaattttcgataagtatcaacgccctaggaaaaaaaccaacgctgccaatgggacattccatggtggatttttggcttatggttgttgcggaactgtttacggctacactccaacacattcgcacactctcagtatgtgttcgttacttgatatcttcgcaacattcttacagtttacagtttacagttactgtccgcaatcacttaacttatacttctatgccgatcaaggtagcaccattttcaatgatacatcgaagaaaacctcacgctagcagatgattcggaaattagttgatcatgaatatccagttctatgttagttagggtttttcgcactgacctagctacatatgtcgataatacttctcatgaacgacaaattaatggaacataatactacaaatggtcctaaatcaataataaataaagaataattttaataaaataattataaaataaaaaaaatataaaagtgtgaatgaaacagataaggaataattaaacaacaccaaagtcacagatattagtagtcgtcaggtactcaatccaatgtgttcctcttgtacctttctactgctttagaattgttctttagctaacaataaagtgtactttatgccttattatttattatgcacgtgacaataaataatacatttttataaacttataatttttatatttaatttttaaaataactttataattatcatattttaattatatatattaatttttgttaactctaggttatttataaaatagaatatttttgattactactctaaaatttaaatattaaagatgttttattgttccgaaaataaaaatattaatgaaatattttggaaatttaataatatttttctgcttgattatattgatgtttttgataaaggcgtttctatgaatctggcgtttataaggtacatattgttttctatgatagaaagagcatcccttccacatctgaggttaaattctgaccatttggataatccaacatcagtaaattagcttcacggataaacgttaatgctttgcatattcaatactgtttttttttttctgtatacaaaatattatcttcatttctatttacattttgaacttaataaaataaaacttaggatcctatctaggactatagaatgtctccgataatacctgatgctttttgataagtttccaaaaggttgacgcatttttcgcggtcctgtgctaaagtctgatcttccatcaagagttcatcgaagagtgactctttgtaaagctttgtgactagtctattttggacagattcttttgaatagtttactagcaagcacattacagcctttgggacctgatcttcgatcatctctctaacaatggaaaagtatgagacgatcaatcttctaattaattcacattccaactcttcacgttcggtaaattcggtagcagcttcagatttggtatgggcatctgcgctcttgtctttaaaatcttgaatttgcaaattttcgatgtcataagaattatcagagccgttataatcaattctcgaagaaagctttgtattggaactcttttgttctttgccgaagaaataattcaagaaggaatcctttgattgcttcatatcattttcttcttcagagtcgtgctcgctggttgctgtggaatcagaatcaagcttcaaatcttgttctgtctcatctactgaatcggatttcttcatttcacgttcagcttgttgttgctctaacagtagctgcttctcatattccctctgtttctgaagtctttccgtttgctttttgttctttctagcttcaacaatctcggccatggcctctgtagcacttgggaaatttggatgatttgtgttaatgtacgctttatgaatatcaatcaaactttcgacgtaagaacgagttggtcccaatctttccctcaacagttcactgacaacctcgactagcttactttgtagttttggatatcttgctagctcaggagagccacagttgtgacatatcttcatcaattcttcatacaccaattctacgcaacgttgagatggatctagaagtaatctgatttgtggtttaaccaatagatcgaatgctaattctggaacaaacaatgaaggtcttggcccagttgagtttcttatagctgttctgatgtccgtcattgataagttagaagtagggttgatgaagtttagagatttcccgaatagagtgttatagatgtaatagattctggcaccaccacaaagttctttagtgcttatttccgaggaagtaccatcgatggaagaaatgaatttagtagcaaatttattcatcaattgcaaaacaaggccagctctattttctttcgtgataactttatcgtcaccatatgtagccaattcttgttcggtttgtccgatgagggtatttaatctggctttgatatctggcaatttatctctaatgtgattcatcaagacttggttcaataatttagccaagtatctggttccgcatctagttgaaatagttctgtaaacaggatgttttgcaaagaattgttcttctgagttcaaagcttcttcaacacttttgttttgttggatgtcttgctgggatctgttcaccacaccgacaaatcctagcttcaaaggatacaacttccctgacaaaatatccaaagcattagtgccttggtccataagatccaatttagtaataacaccaatagttcttttcccatggggatctatctctctggccaatttcaaagattctgaattaacgagatcgacattagcaggggagatggccaagatgatacagtttggcttggcaacatattccaagatcaaattctcgatttgtctttcaatatccggtggctgttccccaatcggaaccttagtgatacctggtagatccactaaagtcaagttcaaaacatgcggagaatatattttcaagttgattggaattctgcttattcccttctctttccctgcaatcctagcagtttcgttttcaatttcccttctaatttcagaaaagtcgtagaatctacgacctggaatatgtaaaaactcaccccattcattctttatttcaggcttatagtttgaattctttctcaaatgatcttccaaggtcatttccttctccgtgcgggcatctggctcgtcattaacctgttcaagtgacgtagatgaagaattgtcataattataaaccaatggagaattcggatcaatattattcaactgaagaactagaggacgtctggtaacaataccagtaccacgaggtaagaaatctctcccgaccaacgtttccaagatcgaagacttaccagaagattgcgatccaataacagctaaaaccggtagatccaaactgtcaatgcctgcatcgtacataacatcctgtagcttattcaccgtaggaatcaaatcttctagacttgacatcttcagagttacttgtgtactatactccgacctaattaaccgttctaatagactagtttaaggttaacaggatcgcatctaatatctaaccaatcaaagatacactcaaacgcaatatttaaccatttcattggatcaaatttcaaataattattctcaatgcaataggtattttttattatttatttatttatttttatttttatttttatttttatttttatttttatttgatttaatttgttacatttttattctctgtttgatttctgctgaaaattgacttccaatatagagatccgctgtgatgtacgcgcaaattgtcctgaatccattatgtagtatatatatatcagcaccgtcacactacgatttaggtttcctatggacacttagagtgtttattacgttaatagtgtttatttcaggccgttttgtagtagcgatcttgtggtggtttccaataacttttatcatcttcgtggagtaatgcatgtcaaaaatatctcgaatgttcatgtatgcttcttcagcaccttcttcagtgtcatattcttctccagttatgtagttcttcagatttttaaagttcttcttcgaggttggtataattatatcagtccgttctggttcattgcaacggccgatgtattttcctgacactccaatgacagacacagttgatcccagtctgaactcttgccttgcttgcaattctgtccagaatgttaacacattgactttagaaattcgtccatcactgatcagatggtcaaggaatctgcccttggggtcatcagggaataatggtatcctgtataatgcaatgtcttgcggactttcagagaaaatgtctcctacggtccaattttgatatgctgtgtttctcaaatagttggaaattactcttttctcttctcccggtatttgtaaggttgcctttgttttattatcgaaatcttcgacaactatttggtctacaatctttaaccaccatttgagcaatttgtcaccacttaggacgtgtttccttgggtttttagatgagtttgaaaacaaatactgcggctctgccctggtaaaaagacttacctttgtgacaatttccgtcggaaccgggaatgaaacgtataaatcttggtctgggattttaacccttgaagttatccccttcgaatccaacggtctgttggataatatttctaacgctctctgtactgatgtacttctctttataatctttgcaccgctcagtgctttccttatcagcggttttaccgcccgcaaataatgtcctggactaattgccagaatatatgcaattattgacttagttatctgaccaatgtcaagtcttagatcgcaatatccgtttgtatctgctttggagacgaacaagagcctttctacgggaccattattggcagaattcaaactgaaataaacaacaatttcaagagcaaaaacaaccttctcttcaaagcataatgcgacgaaatgttgtgtcttgatggtcttcaccgtttttccattaacgtcttcagcttcgcgttttggaaaagttattggcgaggtttctcgtggaattgactggagattaatgatttcgaactcatgaccgaacggaagtgcatctttaatgtaacattctaaggacatactactatatcataatatctgctgggcttttctatcaattaacaattcaagttcatttctatatttttgcatagctaagagtgtattaatgatccgttgtacttttttataatgcctttctgataatcttaactactgagaaagtttaccaataatggaaagccgaaggcagaatacctctcaggaccgaacgccccttaagattggtcttgatgataaggaaaccgaggtttctcagatttattcttcttatataccaattttattctttaaactaatatacttttgcttacagaagacgggttaagaccgctttatcgtctaatctacaggttttcatactcatcgggatacacaattaaacgttccacaccttcagcagtaaggacaaccattctaatgacaccaccagatgaaccatcccatttgatggcttgtgatagagaatgttttacaaattcgattgtttcttctttagtcatatcttccttatagttcttgtcacagtaaccatatatgaaagcagaaccagaaccagcaattgagtacgactgcttgtgcacagaaccaccaagaggtatactatacacctctcctttgtttttttcatcgtagcccgccactataatacctgctgtgagatgatccttgttctcgtaacataatgtcttgaagatcgatgcagcaaccttggttgtaggttctccatattgtgaggtgtacaattctagatggtactgtacaatatcggcaacagcctgagtgtctgctgctgaacctgacctacaacaccagattttatcatgaacctttgttagtttatctgtgacacggttggcaatatacgcaccagtagttgttctggaatctgcccctaagatcacaccatctttgaaagtcacggccatactgttaacattaattaagtttagttagtattcactgatatcattaaaaccgattgattcgattgtgggaaagaggaatcttaacgttcccttattgatacatacattgaagtacctagactcacttcgccctttttcaagcggttcatatcaacttgaattccatccattttcgattatatttgggaatgatttgatacagttgctcactgatgatactcaatcctgtgaatatcgtcttttaggcggttgcattccttcaatgttgtatctttctgtcaaaggtttgccacccgccaaaagattcagttattccttaatattttggcattatcaacatagccgggtaacagaataatgataataatacaaatacaaactgagaatgtacttagctacataaccggctttgatgcaagtagaaccttacgatgggacgcaagtgtggatcagactagactcattgaatcggtctggatcttcttctagttggagaatcgtcacgttcgggcagagaatcgccttccaagaagtcgagatcaacttttaatttatctggatctggtccttcaaatggctgaggcgatggaaatccgaaaaggcttgtttctggaattttgttgaagctgatgtttcttgtttttcccgctaaccttttattcacactcaatagatatgtagcctgtgcgcctgtagtgtcctttgcagctgtgtttcgctgatcacttaatctcgcctttacagtgctatccagcacatttgttgtcttgattgggcttggtattgctccccgggccctactaaacctattccttattctatccattttatttcttttaactcttgtggagccaggtatcgttaccgcagcattattaggtgatttcatgggagtttgaaatgtcaactcatcattttggggagaatagctagctagttcgttaccagacgaataatttacgattgaaaacgctttctccttccataaactcataatagctcgaaggttagctctgttccatctcactctaaacatggcaactgattcttcattacgcttaagttttaacaccttaacgctccacttgttggtccatttcagtaacaacttaacctgcttttcttcgacatacatggacaacctagagtcctgaatttgaagtgcctcaagctttctaagaatagaatcaaaagcattggaaacagatatgctgtcatgaatttcggcagcctctgtatgcattaattttatgttggaatatttcgttgtccattggagcatagtattcttcagagaactcatatcggagctctgttctgcgatagatgcacattcaactgtgtagaagcgagagcgtttcatccatgctgaaaggaatttttggttaaattgtaaagatcttctatcttcaaacttgtccagcaacatttcaagattaagtagccttttagattccagccgggtcttccaaactttccacaaattttcaacgagcattttactgttacctttagagagttcaatcgacaaacgagttttcatacgagtatcgttaattgaacgcttgataatggtaataaagcgcagcttcatgaaaacttctgctttcctttgtgatgaaagcaatagtttataacgattaatccaaaccataaaatgcctcttactgatatcattatcataacatcgagctgaaagattcccaagatctttcagagaatgctgtttatttttaacaacattgtaatatctcttaaggattaaagaatcaaattcctgagcaagggcgttcagctcaaatttcttacgccaaagtttcaaagctttcgagtatttggcttcttttattgaagagttgaattgggctgctctgcatttcaatgtgatggaatggatgaattttttcttcaaaagtgaggtgtaatgagaattcgctgttgcgtaactttccgattttagtttccattgagaaaagtaaaagcgcacaatctttgtgttctgttgaacgacgtaatcatgactattagttctttcttcgaagcgtttttgccatacatataaaacatatcgttgcagagattcagtgttgcactcttgtaccttcgactcgacattaaccaatttatctgctagtaaaatcatttcaaaaaaccttcgtttgatgaatatattacttttttctatgagtttcagctcgtatgcctctttcttttgatattgcgagatccatttattcaaaaacggacttagatgaaagtttcgttctgagaaagtcgcgagttctcttaggtatatttcatgtgcatacttctttttccattctgtgaagcctttgcaaagtaagtatcgtttcattgtcgttggattataatgaccttcacacatttttagcttccacaacttgaacgatttctgaaggagatgcttttgattgacatttttcgttctgttgaagcattgcgttaacctctcgtgtttcgcttttatgtttgcaaaggtattatccaagaaaaagttatcagcaatctgcgattttgtatctatttgatggatcctatcaagccatgcatcaaaaaaacctgtcttgagtctctggttgtatacttcgtctccgttttttacccattcccggcatttgatatcagatgtttggacccatcgttgaaagaattttttctttacgcacttattccatatctcttcaagctctgaaaggttgtagttcaaagagcatttcaattgccagcttgaaaacactttcttcagtaacagtctttccgtcttgaattgaaagtacgccaatttcatgatgacgttctccggcttcagaagaaatgctgtgatgatgtcttgtaaaatggtggaaaaatcataccctttgcttaattcattttgtaaatttaaaagatacttgtcctgtagtacatcaacgttggattcacctagtagattcacataacgttggaaaatagtcaaaaaatccagagtcaaaccatgtcgcagaaggaacacttggatcatgttatatagtcgctggagaataggaatgtgtatattgccaccatatatattggcgtgtaactcatcgaaattctctgatatactattatagttttctgcagagtaattatcctggacattcgcgttttccatatcatccgctgctatttcaaatattccgttaagtaactcttctggagtgtttcccttagcttgatgctctcgcggcacttcaacaagatttcccgtgagatcctgtttccttaagagttcattgaagtccttatgcaccaatgacccggtggagtgtaaatagtctggtgaaatcaatgcatccgtagaagaccccaccgtatcgctaccttccgtaccgttcattaaaaaacacaaagatagaagggatagggtacgtattcagaatacaatcaattgaaatgcttcaaaagaattagttcataccgcgtaacataacccagtgtcgcagcggtgcattcctgcaaaacaacgcgtggctttttatttacagactaaagttgatcctttggctttcatttttagacctttgaagatgaaattaaaaacatcaaatatagaaaaaaaagaagaagcgcacatttactttaaagatacgtttacattaaagaggcactgtttgaaagaagtggtttacctattttcttgaacactgcattgtgcaagaaagcggtatccgatctacaatgaagtacgcatcattgagctcggtagttttgttactgatcaattttggcattggttgtgcaattgcacaacattgggagaatgtcgagttcactagaaccgtagacttgtcaagatcctacgtccacgaagccttgcaactaacaattagaaatataggggatgaagcagacaatttatatatgcttccattcaccgctgaagttgcagactcattgtcagcagtttcttgtatgttgaaggataaaaatattttcattgattgcgcgttaaccaaccagtttgaagagcttcctaatggtcaaaaattacaatatggagctgtgaaattacctggtttgcttcagcctcaaggagaagttgaattggtcatcagttacagttataacaccaaccgttatcctgttcctgcgcgtattgaaatgatggatgtgcaaacgttggttttagagaccgagagtcttcccctttctcaataccccaccgataagttcacattaaatatcattggaaccaactcaattgaaaaattagatgaagaaaagagcaagaacagcaagagaaaatctggttcgtacagtttcaccaccgacgatgttactgaaccattcacttttgagagatccaaattcttatatgaacataatttgcctttaacaagagcagcaaatttgaatagagaagcatgggtttcccattgggcctcaactatagaatttaaggaagattatgacctcgttaatgatgctgctgagctagcatctgggttttcaaggtctaaatttatgatgaatggtttaggtaaaaaaccaagtcatgctctagtagcgcttgatatgatcttgccagaagattctcattctcactactacacagatttagttggaatggtttctacttccaaaatctttgcttctcattatatattaaaaccaagatttccaatttacggtggctggaaattcaatttcacgatcggctggactaatcctttatccaattatttaaaggttctttctgatgaagaatatattctctcagttcctttgctacaaggacctcaagacattttctatgattcggtcaatttatctgtctatcttcctgaaggtgcaatgattgaagaggtacaagtccctgtcatgaactatacctcagatacttcatatgctcattcttactttgatttgacttctggccataccaaggtaactattgaaatgaaaaacttgaatgaggagttgaaagacgcaccagttttcttgaagtatagatacagcaaatctgaattgttgagaaagccagcatcgattgccatttacgtgttcgtagcattgttcagtttgttcttgatcaaacaaattcagcttatcatcacagcttaaacaccagaatataaaactatcatagagccacatatttgttatatattgaagtaacgacaaatttaaattgatatatacagtctatctaacgggagcatagtaaataaaaatatttcaacgatagtttcccgaactaccgtatcgataaaaatgttactcacatcaaatacctctccagataattttttccacaatttcatatgtctgatatctttgagttttcaagatcccaacgtattgacattctgtcaaccccttgatgaaccaaactaacgctaacttatccatgaattcgtcctgatcgagtttttccattatttttcgggacttgtctttgacagaggttttcacctcatctcctgcaagaacagattttaataggtcataaatctctgattttggtaaggattctttgaaggcaacgaagaaatcatacacattgatgaaagagcgggcttcacgataaagagtgaatacttgacatataatagggtctattaattcgttgagttttctgtccagttcacgtatctcatcgtcattgttcgccatacgctggatgactttactcctcggcaagattctttccgagtttaacagattgtcttccaaattagtcctgaagaatgggaaaagtccttgggataacagtccgttattgttgtccaacgtgaatagctcttgaaaaacgatttgtacgttttcgaaatcgaattcttggcgaaatttgtcgcatgcttcccatttactcaaataatcgactaatctgttgttcaacatgtggtaatacaaatcaatcaaattgtaatcgtaaatattgagtttattctccaaaatgttaacgatttgatgtaatttgtcattgatggggttttctgccactaggaagtccacgaaaaattgttccaacgtatcattttcattgttgagcaatgatacaatttcttcccttggagcccttgagttcaccatagtttctacaaagttcaaaaaggtttggcatttagtgagtctatccagatatttctcatctaggaaattaatgttggcaacgtcaatgaatatcgaatacggattattgaaaaaataagacatcagcgagtaatccaagattttcaacaaaagttgaagattctgattggtattattatccatcttttcaagcacaaacttcacgaatttgggggataagtttaacttcctatcgacacaatctaggaaagattgaaagatcaagtttgagtatttgtacccttttgtactcgataaatcgatagtcttcaaatcataactcaatgctctaatgatagactgatccaaattattttcgaatttttccacattggttgttagatttaacacaaaacacacttggatgcctttaattttcaaagtagctttcatgagatctataaactcttgtaagacgttcatataaaacgtctcagtttctttcaaatttataatcaagttcagttttttcttgtaagtgggttgaaacaattggaagacaatcatatcgtataacctgagacttttcataacctcctcatcaaactcttctgttgcgctattgggatcggattgtaatttcaattccatcgattccaacatcttaaagatgactcttttcaacaacaatcgtacatttggagcatcctttggctctatatctactaaaacgttataacaatcttcggtatcagctggtatttcaagtttggtctctgcatcggaacccaaaagaatcaacgtcttaaaatcgttcctagttatttctgatgcgggattggatataagactttgaattgtattggaaatattcgttaccacttctctatcgatagaatctagaatagtgtcaacgctagtatggaaatcagcgtgtagtttattgtatagagcccatctagacaagacactctcatctgactcgagaccatcgaataacttcacgaatggcactggagatgatccattatcgtacgaatcaattgaatctctattgaacttgggagtaaacacaaaactctgtttctgtgattcagcgaatgcagcgagttccattaatgctatagtagcagtatgatcgatcgattacgatatgatctagtatcccaaaatcgcactactgatcttaagttagagctcatatgttttacattttgaaaaatgtcagaaataaaagcagaaagaatcctttaaatatgtagaacacacattatactatgctaaaaaccaattggaaaagtatttacaggggaaaagagagggaagaggacataaataaaaaaaaattgcaggagaagggtagccagtgagaactcttaccaaacgttttcagattcacccttgaatctgggtattcttttaggttcccaatcctgttcgcctaaaccttgtaacctgtagtattcttcttttatatcgaattgtctttggttagccttcatctttaccaaatcgtcttccttcatttcttgaaccttctgatccttctgttggtatctaacagcagtgaattcagataaccaaaaagaaccaagaacgatcactgaacaaaagggtaaaccgaaccagaggaacggattcttgttcatatgtttctggtacctaccagcaagtgacgcttcatatgccagctgttgtctttttgatctgaacttcttaccaccaaaactcattgttgggtgttgtaatgtgctgtaaagtggaacgttattgacatagagtgcataagctaatagtgtatatatatatatatatatatacaagaatatccgaagtaccgtgatgagattgaatttgctgggagtctcgaagaataagaaaatccgacatttacccggccattcaaaacgaccacgtgacacatgtcacgtgcctccaccctctcggaccaaaggaacatcacagccgtacctcatgattaaatgaccttccctatttcccgcagcaaagtgccatttcctatttcttacttccgttgcccccccacaaaaatttagaataattaaaaaaaataaaacgccttcaaaatactcaaggactctcagagaacaacgtacgaaacggaacaaaaaaaaatcagtttctccgattaatttgatcaggtttgattcaaacttgactaagcttacaagacctaggcaaaacgtcgttcatacaatacggactttgaaaccaagagaaacaaactagcactaattgactaagccaataacaaacacaaacaaaagcagaaaagctaaagtaaaaccgagccgaactgaatcatgtaacgcgcacagaatgcctattcgttctctgttttctgtctcgtataatctccgttaaatacgaaattaaaagtcaccgtaagaggcaattctcaactgcacacatgctgcgaattctgtcccgcatttttatgctgaaataggccaaaaacagtcccttggaaacggtatattacctatgtatgttacatatatatagtatgctaaatatatatatgacaacagtatcctgactattatatgtatcgtctacctttctcgggcttgaggttttaacatttttttttttttgtttgcgagtttcatatgactatactaatttacatggacggctccggattaagtttaggtctcggttccaaacttttttagaaacggttcgtcttattattaagtgttgttttctttagaatataaaggttcctccttttaaattgcaagactttttttggtgtttgttttagttttaagcgttgagaaatacttttttatttgacaagtccgtatttatatcataggggagtttaaggctagatatatattctgtcatgcaagctgcctgttcgaatattagcagagacacacatgcgataggacagatgaatatgacgggacttcgcggtaagaggaaagtacagagtcagagtcaggggcaaaaccaagcgcaaggcctgacttctcagtctcagcagctgcaacattttttgtctaatcatgatgacgatgagcatgccgatatgttgatgctgccacggagtggcaacgttagcgcggtcactacagctacagctacagctacagctgcagcagaaccaagctcactaccggcaaagattacgaacaataccaacaagaaatttgatatgttgcccgatcatctacgattgaacggggtgactcccagtgggaagccaaggttgttcgtttgcaaagtttgtactagagcttttgccaggcaagaacacctaacgagacacgaacggtctcacactaaggagaaaccttatgtttgtggtatttgtgagagaaggtttactagaagagatcttttgatcagacattgtcaaaaattacacggtggaaattgtggcgattatatcagaagaacttcaaggaaagtgcgtagggattcgaagaaggataatggagcagtgctcgatccttcgtcttcgtcggaaactgatacgcccaataatagcactgttagtccaaatagtgatgtttcctcatcggtaactcctgcgaccacgaaaagggtccgtaaaaggtcgatcaagacggaatatgctacgagcagcagtactgcggtgaagaaagctgcgaaggcggcagatgctgctgcaaaagccgcggccaagtcggcagcagcgacgagtagaaatgtgcctacgtctgatgaacccattggtcccttgctgtctggtagagcagggaatgaagaagacgttatgtcaaagaagagattgaaagtgcacagaagagtttcgttttcggcccagtccggtcaaaactacgctatattacctgaatcgagtgacttcacgcaagaaaagcctgaaagggtcgatttctcaacacctcagatgttacccctggatctattcgatactattccgcagtttgatgaaccaacgaatttcaatcttttggacagaaataactggattaatgacttcaataatgctatcattccaggtacagatgaacaactcgtatcgcacactcattcaaactcagtatctgaatcttctccaaattctaacaatacaagaaattcttcttgggaattacaaggtgacacgttgaagataaactcgttgttctcgttccccatgtctcagggagaatcgcaacatgcaggtgctgactggaaaactttggcaagagctctgaaacctgaactggaaaatcaggactcagctaataaaactgctactgaacaaatcacaaactctttacacaactttcaaattaaattcaatggtaatggtgacagaaccgttgatataaatatcaatgccagtaattcaattaacgacaatgtggaaaatggccgcaacactgttgatccatgtctgacatcaaatcatatccagaaagatgttatttccaacacgattcgtcccaacgttaccatgacccacaatggtatccctacagaatcacctccacttagaaatgattctaacctgggcaatgacttcaagttcatgctcccatcggcattcactccttctaatgatcccctggataccaccaactccgctatcaaaactaataattctatcaacaatgatcataacattgctcatgctcatgataaccccacctttaatgatacacacgaccaagaacataataacacattaatgaaaagtactacatctccattccctgacattcacagacaaaattcattgcatcataatcacttgcatccttctaacgagttcccaaatacagaaattgatcctgctcagttacaatctatcatggatccggggtacacattttatgatgttcagtactctcaactttgtaatatatcaaaggcttctccaaaagatcaagacattaaaatcaatttcttcaataatgatatcagaaacatttgcgagaatgcgttgatccattattcaagcatatgtggccctagctataaaccttgttctttgacttgttccaacgatgagttgaatacatatttaaaactttacatcatgcgcttccacccacataacccgttcattcattcatcggtatggtcatttgattctgaagcgtacagatcttacatttatgaacatgatgcgaaaaatattccattcagtgtagatgatatgatctaccatacaaacatcatatgcttgcctctatttgcagctaccattggttctctttataagaatactacttcttcttctacgagtaagacaagggaattgtatgaaattgcaaggagagtactacacgtttacttggatagaagaaaaaatttgaaacgggatgaaacaacgtcaccactcaattcgaatttatggttgatccagtctttgacattgtcagtaatgtattccatctttgctgaacatagtaactccgatatcaacagatcagatcaaatattgaaacaagttggagcagtttgttctttgttaaggaattactttttaccgttggttcagcagaaaccagaaaatttaaggtcggaagctgagataataatatgggaatcaaaattaagaacaactttgacaaattacaacttgtgtcagtttttacagattttccatagattatcctcgtcgagcttcatcacgaattttgaattacagacgataatgattcctaataatgaaacgaggtggtcaactttatcattcaactggaatagtactaccataaagtccgagcatctttaccatttgaatttcttacactttttccaaagtttccagtttaatgatctaggttatcatactattccacaagttttagtaaattcaatgcttttctatgagtactcaataaaattatctgggtcaaacatgaatgtgttcatcaacaaaatcgatactaagaaactagagaagaatttaccccaaatcgatcaggattctgctacatcggactgcttaattggtgactccatcaatttaaagaactctttgatttctttgagattgtttgataaattggactcccattttttcagaataatatccaaatacggattaactgacgatattttcgagaattgtttgtcacccattcatgccaatattttgtccaaaaattctgattctttggtaattgatttgttggtctcagttaatgcttctatcaaaaatattgcatcgttattttactacaccaatgagacgggatattatgaagaaattaagtttgattactcaaaaacctcgttgttccaaattcagggttatttcttcaatttcctttgcattttaaaattcatattagactttgaagccactccaaatttcaaggtgttgagtatatttgcggagttacggaaactggtagagcagttaatgattccgaaacttgtccataattaccctctggagttttcaaaattcactgacttaaagacggcatatgatggaccttctccacaggctccagctgtccatacgttcagtcttgaacatttggaaaagagcatcgaatcagttttagtacaatcattcaatgactataactatttgaaaatgccagttggtcctgtcaattcgttgaatgaattcgaatttgattcaggctacgctgaaccagctccaggacccagcaagtcatcaataaacttactaaggcaccacgatctatgtaaacagaatggtgctagaacaagacagggattttatgaccgttatcatctatcagacaaattgttacaggttgccaaatgctctttcctcttgatatatgaatcacatgtacatggttcattattgacaaatttcattgacataattaacactcttcagtcaaaattagacaatcaacgcaaaattacgaatattattttcaatgaaggaacccatctctttggaagcaacaataatcctgtcaacgatcacactcattcttttgttaacatgctgaatttgccaaactcaaacactcctcctggagattactacttcaatccgaattccctatgactaccgtaatatttaattaaacagctttttgatgtatgagatctcacgaaatgaccaaaaaaaattcctatagtatactatttataaataattgaacagtatttgttaatcccgagaatataatgtaactcttatttattctactttctatcagtcgggtcaattattgtactcttactgtgatacacttttattacgcctcttcattaattacggtctgaaccagccattccttatttttgatcctaaaatcatttataccctccatcaggaaccttttagaaatgctattttcccagtcggatgagttctgcaaagacgtctcgttgatgaaaagtatcatcttcttactgtggtaattatgccgaaattctacaagttggtcgaacagatcatcgtccaactcttgctgtggtttcaacttcaagtttttcgtgtattcccaatgaccaactttaaacacctggaaaatgaagtccacgaaaaaattcatatcggagtctcctaaaatcaatatcgagtaatcttccaaaactactctggcattgtttagttgtgcatctaaagtcaaactgctattgaagtttgtcaggaaactaaaaacattgcttgatttgataatacctagattgaagtcagccatcaacctgttactttctccgctcggcaaaagattttgtagtatcgtttgagtcgagatataacctttgtttatgcatgactcaataaacctccaatgtagtacaggccatcccaaagccaatgcttctaaatacttcggacttcttgaaaagtttcccgcaataagacaaccaaaacggtaactgttaaaacgtggattgttccaactaaactctcttgatctgtcttcatatcttaacagactttcaaaccctacgctggagacatatcctccttgtatctcgattagataagataacctttttctatccatatcattaagtccactcaatacaaagatgcacttttcgaaaacagaacctccctgtccttctaatccactcattatagtagtatcatagaaagtgtctctgaaaatctctgaagttgacttgttataatcttgagcggttttcttcataggagaaatagaatccctcactgatcgacttctaacagaacgtctcaattcatccaaaggatcattgtcttcatcttccagttttattttggttcgtttgatccactccccggtggtaacgtatatggatgcaatggtatctacaatatcattcttgctgagtcttccgtttctcagtacctttcttaaatgcaccgtatcatatcctctaatgcatcgaatgacatcttctttttgtgggatctggcaatctaaagctacgacttgatattcattcatcttccagtggactttatctccacatctaatatctaaatagtaaatgtcttccaccctaacatcattttgacgtttctcgaaaagaacggagcaatacccaggcttcgtacgctgttcggaaagtatcttaccaggataaaaattgcaatcattaaaataataccagaccgcattattgaataaaacatcttttttagtcaactgcatttcatctgatatacgaagttctttcggcaggtagacaccttcagtgaaagctgtaaattgtgtcattttacttggtgtactactatcttcaaattcttcttctaatattagctgcttgtttttccgtttcttggatacattaagttgttcttgtgactcaaatgacggtttgtgcttgcactcattgcgttcgaaaatttcaggtagttcctgagtttgttcatattcctgatctgtatccagtctcgagagctctcttgagacatcattcgtaggattatgttcattgtgtttacgttggttcaaatcggtagcatcattccggacacccccaatttgttcatcctcgtcggatatctgactggatggtttgacataatatgtgagtttaaacttcatttcactcgagttttcatctgtttgttccttctgagaagattcattgttcatctcaatagacgagtgacatttggctacttcctgatcttctttttcttcttctctttcttcttcactaaatactgttgaaggtgatttattggaggcctgctgcatgggtcggagattaacgaccgctggagaatgaaccaactggatttcttcgttgaaattagaacctgtttccttttgtgtcaatatagttctggtagaaggaagaagactgtgatgaaatgagccaaaattgattggagatgtatgcactattgatgtctcttgaagtgcagactgttcatctagtttcaataagctctctgagacatcgaggttattagactgagttctaattagctgagtcatcttttcatcggccaatgtagacctgatttcttgtgtttgacttacattagctgaattcgttgcaggtactaacatttcattagatgtttgagttacattttgagtgtcaatatcacccaagatattaccattatctgcatccttcagtgtcattataaatggttgtggatgcccctctggggacgagttgatattttcaatcaagctgatcggttctgaagctgccttcacttcacctttagcattcctaagtgagcgaatcgatatcttattctttaatggcgtgtctaataattcaggttgatatgtgtcattgttattcaaaagaatacctttagtttgagtcaaatcaaacggtaattccacttcgatattcaagtctttctcctgaaatcgttgcaatacatcagtctttgattggatatcaattcttcgtctaatctcgagatctcgatttccctcaggtgtgtcttctaacagggatttattcgttggatttaaattgagagcagtattacccaaagcctttatagccttgttaattcccgtgagcgttcgggtgcttgtattttcttttaacactatttcatctgaggaagtagactctatcttgttcgatagctgttttcgatctggactgtaattgggagtctctttggtaataccactgtcttcttcgtctcctgtcataccatatgaaacagcagatactgatattgatggttcagaatgaagtgatattttggctccgtatttttatcgaatgtttaataacttttgttagttgtgcgttacatactgtaaactttcttgttttggtttatgattttctgtcaatattacatttgtagttgttaaagactaagacattaaagagtcaactgtgcgatgtgtgagttttattattatgtatccatagccggtcgcatctcttcagggtattagtatatgagttgctagtatagcactggttgcaggtttgctattctaggaattgattttcggttcttctaaggaaaagtatgatattttctatcgatgggtgtcagacacacatgaagtgaaccttttagaatgcattttttggttgttggcacaaacgatatataccaacacaagaggtgtagcttttatgatcctcgccttaagcaagcataattttgcttctcgtgattagcaccctttagtcggcaacaataactgtgatatcatgaccgacaaaaattcgaaatgtaatggtaagtgacattattaaatgaaagctaacaatgataacgattgaatggtaaatactaactctaatgtcatctactattaggttcatatgttgatgttctactttgttttgagtcgttattggaaaaatgtctcaagacgcttgaagccaagcaactaatcaaagattcaacggaagtatgggacgactttgtggatatcatactctcgttcattcccttaaatcttgtgaaagaacgattccaaaatggtaatattagcaaacagcgtatcatttctataatgcagggtattcttgatcacaatcccgatattgattttacagtggatgcaaattatatgtcggataatctatgtgctagatatgcagatgatcattttgttcttagatggaagacaaacattatcatcaacttcagaattattcaagcattcttcgagcttctagatgaagaatatgggaccgcttttttctctttccgctggattctacagttcatttcagtctctaaaaataagcgtcacagtgagaagcgatcagacctttcctcgtctcggataacatggataattcgacaaacttcactttatctggcaaaatgtttgaatttagattttaatcaagggaaaagggtaaaatacgtgtccttcaattcggttagggtgaatcgtttggacatgttcaaaggcatattatacacaatattggaaaattcaagcagtgtaatatctgcacaacaggacatccagaataagcatatgactgcggagtatttcaagatatgtgcagaaatctatgaatttattgcgctactcgatgggaaagtattagactatgagcacgcacatgatgttaagactactgtgataataccgcaaacagttttttccacttatatgatccgtcattacatgctagctgcagttcatttcccattcgatgaccctaaaaggcttgtatgtttccacaaaatattgatgggtttattttttgtgaataaagttgacttagctactttcaactacttctatggtgagttctaccagtgtgcaaaatccataaatgaacagcactttgtcactgattatgctaatttttcgctttctggtacctttgtgaatataattgagtcagttgcacagaatcatcaacatctcaagcttttaccaagtgtcctaatccggttgtctaccaatgaagtaatagtcgactctgaattcgatcccgtcttatcaaaccgacatacttattcgaaagaagcagagaagttgaaacgaaaagttcgtgggtctgattatgaacgtgataatgttgaaatgggcgaaaatggtaccaataacttcatagaattttggcgacagctcaatgaaagataaagcaaaagtacacttttatataatttttgttatatatgtaacaccaagtcttctatctatatattagtgggaagcagtgttaataaatcgaatcgattaagttgaaatagtttcttttacaaaattactattcaattcatcaagacgtttagaactgtagccacgtatttcctcattgatctcttttgatttatgattaagttgatgctctagaacagtactttctgcaagaatatctctttcatcattatttgacggatagttgttgccagctaaaagcttttgcgttctgtaattttcatatagcttattgtgcgttgtatctttcaaatcttgaagatgagatcctaatagaatgttcttcaaataaatgaaatcacaatgagccctattttccacttttacagttccccaggagtaccttctcacgtgaaacagttctccatttggtgagacttcaacttcattactaccaattatcgaaaatggtaacatatccctgattctacagcaagctgtattcaattgggctgttccttcaccataactattttgctgcatactgtcaaaagaagtgttattaggaattggactagaatcattagcctcgacaagcatcaaagtatcttctagtttatcatctacaaaatcgtagatattgatatcattttcataaatatcttccatgatgagacgtttatttaatgctatttccctttcggttaataaatcagctttgctgatgactgggatgatattgaccttgtcacataacgccttcatcaattttatatctagctcacgaaggccttttgacgttgctctaatgaagaataggcaaacatgtggtctagtgtcaacattttttgggtttctcttgattcttatttcctcattcaacacgcgatcgaactgggattccaaataatcaacaacgacttcatggttattagaattgttgatattatcccccaaacctggaattagaacaatgtcgaggcttattggtgtagaattttcctcttgtaaatggaaattcttggacacaatatcaatgcctgggctcaaatgtgcggtggcaggatcaaaaccctcttcttcgtgtccaaaaacctcttggttgcagatattattgcaaaaagtggacttgcctaaacctgattctcctatcaccaacatgcagaactgtatgcctcttttggcatttttcctgcgacgaatttcttctgcactaagcatctgataattagatttctttttgccaaacattatagctgatgggaaacactgttcactttgccaccgttcgtgaaccttcgtatcttttccgtgcgcaaatagtatgatgcaatgatgtggttctttcttcgaacccttttttatcttttatctgacaacattcttcgacagtgaaataaaagaagcgacgattttgtgtcataaaatagtgcatacaaaatcgagggaaaaaaggtatgaatgagtttgtccgtcaatggagtcgtgatgatactacatagtttatattaattttcaaaatctcggtttcttcgtagcttgttcggcgggtggctctgaaggtctttttatgcttctttcagacatgattctattcgaaagctcttcgatctttctttcggtatagttcaaaagttcttcattgacttctccctcctttatgatgtcgtagtcgtaagggttgaatggttcgggatctaactgtctatcttcatctatcactttgtctatttcgtcaacagtaatggataaagcgctatttttgttgctcttcaaatcgaaaaaggctttttcaagttgttgataatgcgagaacaacgaagcaatgatttcactggttataattactgggaaacgcctcctgaagaagttatgagggaagctgaagcccggttctttgtttttttgaaaggtcacaccagcgaatattagggctaaggccacaagtgtgtatccatcacatagcaatgaaattggctgtgttcctgtttggatgatgaaatttcttgcttcttgtaaaatcacggggaaaatctctcgaagtgatgcatcaatatcagtatctctaacatgtctgtaatatccactgaatatttcctctataagttctttcggattgtcaatgtcaaggtcgaaccctaactgacataacactttcttttcatatgaaacaagttggtccctgacctcccatttcaatttctccacgttcaacttctgaccagttggggacgggccatctttcatcatgaaatcacaagttgcttttatatagtggtcagttggtctgttattttccatggttttgcaggccgtaactagaatagcttgcgccaaatggatgcattgaggtatagtaggcggaagatcatacttgtaccaataacggtagaataatatacatgctgcagtgtaagtatgatcgaaaagtttcatctccttcctcaatttatggaagtacatgagacacttctccattctcttcttcgtcaattgaattttctcctcatcagtacctaaccttttaattatatcagtatactcgaatgtccattcattcttcgggcatttgattatatcaggccaaagatttcttggattgaattgaggattcccttcattctgcttgatgtctaatgacgtcttaccattaccactgggctgggaattagctatctcttcgctggctgaaaggaccatttttaatctgttaaagctcacgagaaattcgttcaaattgactcaaaattcggagtagatatgagatggttggttgggatgaaatgacgtttgtagtggtgtgtacgtctctctttcctgattcaatgccagccagtggattttaacgatgcatatgtaattcactgaataaaaaggaagttatcatgaatgtagggtaactatatatatacatttgtattatatgttgagatcagttgtgatcaacactcatagacaaaatgtgagaaaatgaaggtgtgggcttgaggcagtatcgtagtatattccccaagtcgtcaagtcatcgtgttattctgttatcttttcgtagcaaatccgatttccgtccatgaccaaagctttgagtttctttctatgatgaattttagaatgttttattccgtgagtggatgaactcttcgtcttggcatgagagtcaaaatgatcatttgaattgttctttacctcttgcattgttaatctcatttcagtatctatcgaagaaactgatgaaggtgctggagatgcgtttcttcttgtttctgccaagtaatcatctgacacctttcggcaattaccattattacttgatgcatgggatttcttctccttcaacgaaacgcttctttctttactcttagccaggagccgttcaaacagtacagccttgtccttcacctttttagacgattgcaactgccgtataaattcagtagaagaagaagaatcagaatcagaacttgaaagcgattgatgatccaattcatagatctttgaccaaggctgatctgctaacttaggggcaccatctgaaaatacggaacttcctgaccgcgaatgcgaaattccaaacgaatcgggagaatgggcatgattagaatctgatccagagtcaattctttttagtaaagagcttattgtgctgagtggggtgaattgtacatcatcgagtaagttgccatatttatttggagtcgcagaggtattatgtgtaattatcctatcaggtgtttctctcccagaaattacaccaatcctatgaaagccttccaaaactctcaagtatttcaatccttccttatcgatctttgtcggcttagtgcgtggctttttagtaggcgtactttcactatcagcaaagtcattcatagatatttgcaccggttgaatttgaccatcattataactatcactcccagtatcctcctcaaaaactgatatattttcagcgtatatttggtccaatccattaacgtcattagttgtgtcaatatccgactcatcttcagtttcccagagatctgagttgtcgggcatcatttcaccatcagttctcccgtcattaatgtatttttttcctactcgctggttctggctatcatatccattactttcattatcattttcatcgttgttcatattgtcattgtcttcactttccgatgcagtgtctatttcgtttatccctaaatcatcatttgattctaacagtctcaagaggttccctgagaccttccttactccattatgcagatatcgcagggattgaaagaatgttgtgtcattcaaagatacaaaatcgaaacctcgtctattcctttgtaacatccttagcgaatctaaaaagtatcttttcgtccataaatattgattctttgggtcatgaagtatactatagtacattaatttttcattcgtaagaattcttaacgtccagcatgtggctgacacattctttaaatcagagaatttgagctctgatagtatctggaatataacgtttatcggtagctcatctaatgatttaggacttaccactagactgtcaccctcatgcattttaccagagatttccatttgttgtttaatttgtattcttgttctgtttgtacccttaaagctttaccgattcttatattggtgttaatcggttggttttgttcgttccccttctttctagttatataagtttgaagtcaattctatcgtctcatagagaagatctctcactattccttacgtgtttctaccactttatatcgttcttagcttctttgtaaaagcaaatcaaccaagaaactcatgtgatacacagaattttgtaaacactagctcctttcaatgggacaaagttcgatgctttgaggtttcattaacttctcatcagtttactcttccaggttcattgtttaccaattaaactaattgggtaattatctatcatgtgacttgtttgatcatgtgacttgaaaagcaagaggtttacttgggacctttcttgtagtcccttgagaaaacatggtgtcaatggctgcctcaaccctcaagaaatgatgttggatcgtagtaagtgttctttggtagctcatgctcttgttttttctatgtgtggtctgcttccttaacgaatctttgagtttaaatatagcagatcatcatgaaaagttatgtatggctcactacgtaaatcgaagaagagccaacccgaaatcccctgtaaggacgagaccataggcaactgtagacaacatgctgttactattgatggtacttttctctttggcatgtgcttccgaaagtataagaggtgtaccaccagagaatcagtcactatactcgcccttaccagaggatccaacaaaatggagatgcctagatgatacagcaaaagtgataccgtacagctctataaatgataatttgtgtgactgctcggattgctctgatgaaccaggaactaatgcctctcaagagcgtgctcttttctactgtaataatgaaggattcactccaagaaatatactgaattataagattaacgacggtgtatgcgactgctgtgattgttcagatgagtatttgcgtgagccgttcagtcgtggtaaatcatgttcagagttgaatgatgagtttcagcgaatacttaacacagaattggaaaattaccgtgctggtgtcactgctttgaagaaactcaaatccaagacgaaagataatacagacgatcccaacagtgctgaaaatgttcattttcaaatagatggattgactacgtactcagtggatcttaaaacagcattgaacaatgtcgaagaaaatttacaaagtttagaggaatcttacagatgtaaactctttgaagaatcgccacaattatttgaatacgagaacttaaacgttacttttatcactgactcggtagtgtctgtgttctctcatgctcaaatgttatcaaatgcttttaatgaactaaagttcatcttgaataatttatatgaaacttataaccgtaaacttaatgataaagtggtaattaagaacatgaagcaatttgcagaattagaaatgaagtttaagaagtccttccagcctgacggccgcttggacggtactcagcgtgaccaaatcaatgaatatcttaatgaagagcttccaacatttttatttgagggtaaaagcaaatatactcctgagattatcgttgccaaatctaactttatccagagaatcattaacgtcaagtataaaaccaaggatttaactcttgatggaataaaacagttccaacaaattgcagatgatataattgaaaatcatgacataaattttcaagacggcgcagtgaagagcttcaccgacagttatatgtcgttcatgtccaaatatgaggattccctgtacgccattgatttccctgagaatttcagtgacacattttccgaattattgctgttcattgggaaagaggcaccaaacatcgcagtcgactcaggaacggaaggttctgactggggtgtaatgaggatagtccaaggtgcattcgatcgtatgaactttttctctacttcattgcaatcctaccgatcccagatcaaattcatgaaagagcaacgactctcactaaaaaagaagctcagaaagacagaaaagaagatcatagaattgaaacagaaattgaacgaccaaggtggagaatactcagagtcacaattgatccacaaacaagttggcacgttgctaaataatttaaaggatttctgtgtcgatagcgaacttaattcctatatctacagattatgctattcaaacgacaaaggcggtgatattgttcaaatagagaacaaacctgatggtaacaaagttgtgataggccgttatagaggcttcacgatcgacaccaattcaaaatatgacgtttaccttcaaagcttgaaatataggtatccaaacacagaagttggcaaccatttatcaagtgacactgtcgaaatcggcaaagaggaaatcttgttgggaaatctacctgatttgaacaatgggttaatattagagtacagagggggtactaaatgctgggatggtcctttaagatccgccacaattcaaatgagatgtgcaccggatttcaaaatcgagtcggtttcagaaccaacgagatgttcttacgtatttgaaatgacaggaccattaggatgcgatcctcatttccattatgaaagaccaaactggctaatataacgaatgaatcagggctgattattctctgtggctgtaacacctcatctatctactaattcctagtccaaatacaggctatataataaacgcttttttcctcgctgtgtgtgcgcgcttgaacgtaatcatatgccggaataagctttttaacttttttaaattttttttgtacccctcggtacctgcatgcctttctgccgcaatatctgcactaaacgacataaaaggaagaagaccgttttttgtggcaagtacgacgaaacaagtgaaaaggcattaggtaactaagggaactgggtcaattcgtatagtaagtcatgctctagaagatttacgggctgctggaaatgtcaacattctagaacttcgccgcagtcccaaaaaaaaaaggcgtaatggtaattgaagaagaaaatcttcttggagatcccttgtacgcaggattggacaagaactttaaggaattggagctgcctatttttccttttttttcacctctaagtggcatggaaatcagtgtactgtgagctatttcattacgtgcaaacggaaagcggtgcccttttcgaatctacgggttaagtccgccccccgcacccctctctctccctcaggctcctttttttgagtcgtacgacatgtcaaaacggatacaaaaatggcaaacgactaatttttctagcaagaatatgtttccgcattagtatgtgtcaatatcagttgacagaacctatataagtattctgtggcatttcaggatggtttttttttttcagtgtaaagccttttagaagaataacatatccaatggcaggtacctaagggagtactgcaacaacgagatttgagaacggattacagcaattcggttcgataagctaaggaatgggatattttcaacctgttggtagtgtcgctggaggtgaagaaatctatgatgagatcaatgacgttgatggattcagttggcaaacgtatcctcatgcgaaccatgatagcgcacttgggaatgcacttgcgaaaagtggtataacaaaaagcagttctcaacttataaaaaagggtagtgctaccaagatcgaaactcaaacgttatatttttgtgatcaagatagtggatactgtggatttatccaattcttaaacagcagtgtcctaggagggttctacaagtcatttgaaatgaacatcaaggtgtttaatgtagacaaggaccgtactaatgactctgggagtgataatgctagtgagtatatcgattattggaagaacgtcaaattaaagaagccatctgttttcaccccgttagaagtcagcaatcagaacatgcggttcatatttcggaaacaatgtgaccccagttgggacgaagatactgttggaaagaaacaacgctcacgcaatttttatcaaggagctgaagcggttccgaatgaatcaaggataggcacattaagtgtcgaaggtcaaacggaagagttgtccatcagtttagatgtgaatataggcaagggattcaagatcaaacccgatggtaggagtttcttctcgagagttcccatgaggggcaacccaaacgtcgacaggtgtatcagacatgtatttgctccgaattgtactggatcagggcatatagtggtgaactcgaaaaagataaaatttcactcagtacctatggtcctcatcactgcattgcaaggccttaaacctaacagcgctgccaaatcgtggaatttcgctgctttcatgtcacctagacggacaattttatgtatggagtttacaacgccaaaagaatacggtgaacaaacagtgaccatatcgtcggacacaaacaagataacctcatcacagcgcatatattgcggtatacaggataaacataagcatgtgaaacattttgggctaacactggatcccaagaccggagtagagtatccaaacatcgtagagattccgttacccaaaaaagacggtgaactatgccccacgttactattggggcccttaaatctaatcaatgtgtacgatatattacaagagatgcccacggtattgaaaggcattgtggaaaaggtggaaggaatcaacccatatctatatcagttctgtcaaagaaccgaggtagatgacgaacgtgcaatatcacttgtagaaacaacatttataagtccatagatccaattcagataaatttaaaaaatgattaacagagtgaatagatgcgagtcgtcattaatcccagacatctgatctcccatatccaagagtcaaacgtcaaacgtcaaacgtcaaattacgtatcttggcaatcttcaaacacagcagaacattacccggtacaacaaaagaaatttttttcctcattatcttctcaaccaattttcataggaaaacagagaaataaaaagtaaacttagagctcatctcaagaaattgggactagaataaaatagtgtgtaaaaaaagcagagaataaccttgtttctgtctttgtctctgtctttgatcaaatcagagtttctcctaccaacgctggctgtaaagatagtggaaaattttacgtatctaggttagaagtgcagtaagatcaggaatattcaggaatagatttccctgctcttcggtttttttttttttggtttcattctactagtcgtttatctgcgaagagaaaggataaggaataaggaataaagatttgaattgtgtgtgatcccaggacacttactgttgattagctagttattaaagattgtgttgaactggataaaacgttttataacctagaaattttttttttcttttggttttctttttattaaattgttgagcctattgatttgatccaggtgcatatagaaaagtccactaaagagtagaataccattattgcagctgctaattgcaactgataacacatatatattatgtcaggtaaaagcccgaggaagttaactagtgggaagaagcctacgactctgaaagcgttacaggataaaatgggaaataagaaggataagcctccgcatttaagttctagaccgagacgtttcagtctaatatattctagtgattcgtcgctgagtgatataccacaggattcgaacagcaggggctcgaatttgtccaagttaccgttatataagaatcccaaagccggaactaagctaaaaggtcgatcttcgaatgcgatgggtaagaacggaaagctgatatcaacgaatcaggactcagccatcacatcaggttcggacagtgctacagcgtcttcagactaccagtctctctcggaggatgaaggaggtacaatggcagtagatgatgacgatgatgatgatgatgatgatgatgatgatgatgacgatgacgatgatgacgatgatgatagcgacagttcgagtactagttcagacgatgacgtggattttgtgagacttactgcggaacgtaagaaaaacgcaatgaaacagctgaacgctttgaagaggggcaagacacctgcagaaactgtcgtcagtaacagcaacaataaaggtaatagtaaacagggtggatttcctaatagggctcagcagaatcgtgaagcttcggattcgaatgatgaggacatttcaagctctgaactatcagatgctcctgaactgtcattcaatttcaaaggcgacgatgggatcaagttcggtgatgcttcagtagcctccaagaaggctgatgaagatttaggtgaggaagtcaaggataaagatgtgaaacaacctttagattccattaaaccaaatgtcgatagattggcggtaccgaaattttcagatagtgaggattcagattataatatcgatcaagaggcatatttcaagaccattgatgatgataacgaaaatattaccggtatagataacggccttgagactggtgatgacgatatggctattctggatgttgaagaacagaatatggttaaacagcttgaacgtgatgatcattcttctttcgatgattcgcaggtggaatcaaagtatagagatgggaaacccagaaatgacgacgatgattacgaatacgacgaggacgatgaagatgatgcaatcatgagtgatttcgatatgcccttttatgaagatcccaagttttccaatctgtattactatgatggcagcgaccaacccttaactttaagcacatctttaccgttagtgttaagcgaagagaagcgtaagagggaagagcgtaagcaattaaaacagcgggaaaggcaggagaggttgaaaagaagaatgacttccaagaagtctaaacgtgaacattctgctactccagatcttgcagaagatgagtacgtatttgggttatttttccaaagcgatgacgagaaacctaaagttaccaatgaccttgaatctcctttgcgtaggctcagtaccgtggcagtatctgataaagagctttcatctggagatgaagagtacgaagatattctattagatatcgcccacctccctacagatgaagaggatgaaaatggcttggagctagacgaagtcgaaaactcagatggtgaagatgactttgaagaagatgatgacgatatgagtgtcaccaacgttttcattgatattgatgatctcgatccagatggcttctactttcattacgattcgttatcagatgaggaagctggagaagctaagagctatcctgacactccagatgaccatgtggaaggtgtcatctttgtagatgacgaatccactgatgaagatgacactttaccacctccaaatacaagacgcaaaattgggactaaggcaaaagaagtcgttagtgccaacgttgttggtttgaagcctccgaaacttggaacttggcagacagataacaagccctttagtatcattgatggcctttccactaaatctttgtatcctgctattccgccagttcaacaaattttagatccaagaattgaagtcgaagacgtttcatcacataatggtatcggatcaggaggcgaaaaagaggaactaacccttaacgaattgttgaatatgagtgagcttgaagatgaaaacaatgaagatggcgctgactcgaattctaagaataaagagattgccacctggtatcacaaaccatctgttccattatctgctttcagaaataaaggcatcaacttcgaacatcaagaagacgaatacatgcttcctgtgttttcagcacgcaagttcccaattggttacgttggtagtgaaaggactagaaggaagatcgataagatgaaggaataccaaagaaagaaagatgaaaagcgacggaagataaagaagaaaaagaagctcttgaaaatcagaagggaaaggcaaagaattgaaaagcaaaaattgctcactgctcctgaacaagaaactgaaactgaacccaacgcagattctcacaacaacattcaaactccctctagcgtgaatttggctagtccaagttcaagtgttttcaccgatgcagatgctggaaacacacctaatgatttcaacggtctggttttaccaacgaggaagaattctgtgaagggattaggaatggatgaaattgatcaactgctgaaatctgatgatgatttaatactttctcatcatggagatgaagatggagatattgatctattaggcagtgacgatgcagatctcctggtttctctgactgccccgattgaagaaattgattttaaccatgaacaaatgagccatgttgccgcatggagaagaagaaacagtatcgccgaagctgctgctgaacatatgagagtaaccaagaatggacttttcagtgagacggcgctagctgatctggaggaaatcatcggaggatcaacagaactcccaagttaaccctcattttcacttcctttgattttattttttattccttggttttaccactgctgctgatgcgaaactactcgactaaagcataaccataaactacaattatctgtattctacctactacactttcttggatataatctacatagatatcattctgtgaagctctattcagcttcaccattttttccgtaagaggagtgttgtacttctctcataaatcaacaattaactttaaaatcatatccattagaatattagcaaatatttagcaaatatgtgtaagtgcaaataaacattgtctaaagaccgttcccggttttcagctcctttgtatatgttcaatctctttctgtttcaagcatatgataacccatgcctcattgtctacgtttttttcttttttttgttcaattcgaatgttgaaaagtttaattcatctcatctcatctcatcgcatcacagaaatatgctaggtgaaccaataagattatacctggccaattattagcacccaggacagcaccttggatctcccactcgcacaatggatttgagaactacctatgcatccacgaaactagagccgttttatgctggtactggtgctatagcatctgtttctgaagatggacgattattagcgacttcggtcgtcgataaaatcaacattgttagcttagatagcccacgccgagtgttgcattctgttgatactgaggatgaacaagacatcaccgcattgcatttaactccagatggttcttatttgtgttttgtctcacaagcgcagttgctcagagtgtattctttgaaacaagaaagaattatcagatcaatgaagatttcgtcaccggtgtacgtcatgaattgcgatcaaacatctacacttttggctataggtggtactgatggtagtgttagtgttattgatattgaaaatggatatgtcacgcactctttgaaaggacatggtgctaccatttcaagtgtaaagtttcacggtgagttgaacagtgaaatttggaagcttgcatctggtgataccaacggtatgattaaagtctgggatttagttaaacgtaattgtcaatgcactattcaggaacatactacagctgttagagggctagatttccgtgtcactgatgaagaaaagggaacgctgcagttattatctggtggtagagacaatatcttaaatctcttcgagtttaattcgacgaaaaagtataagctactgaagaccatccctgtcatagaacaggtggaatcgtgtggatttacgcaggacccggatgtggtttactcagccggtggtggtgccatttaccaattagtgtccttgtcaacaggaagagtattaaagaaaacagcaaaacctattgaagagctatttattattggtacactatgtatcctgaacggaactaagcagtacttggtattttcagatcaaactttgttcctaatagatgttgaatcagctttacaatcggaatctgaagtaattgaagtggaaaataagattgcaggtaatcatggtaccattgcagatataagattcgttggtccaaaacgggataaattagcattagctactaactctcctactcttagaataattccaaccccaacttcttcggaggaagagttcgaaaatggggagaacaaagaaacatttcctattgaagtaaagatgtacgagggtcatacggatctactcaactctttggatgccaccgctgatggtctctgggttgctacagcatccaaggatcacagcgttatattatggagatatcatgcaaagtacgaagacttttatccatacactaaatttgtcggtcatgtaggttctgtgaatgctgttggacttcctaatgttatgccacgttcatggcctgaattcataattacagcttctaacgatttgaccataaagaaatggaaggttcctaaggtgacatctgatgaacccgaagatctaatacttgttaagacctcagaatataccagaagggcgcatgaaaaggatatcaatgctatctccatttcacctaatgattctctatttgccacggcttcatacgataagacatgtaaaatatggaatttggatgatggtgaattccaagccacattagcaaaccacaaacgtggtctatgggacgttgcattctgtcaatatgacaagttattggccacatgttccggtgacaagaccatcaaaatttggtccttagaatcatatgccgtcgtaaaaactttggaaggacataccaatgcagttcaaagatgttccttcataaacaagaacaagcaactgataagtactggtgctgatggtttagttattatttgggatctatcaactggtgaatcggtcaagacactagatgctcacaataaccgtatctgggctcttgctgttatgaacgatggtgaatccttcgttacagcagatgctgacggcttctttgagttctggagggataacagtgaagaggaacacgaacgtaacctcgagcaagagaaactgaagattgaacaagaacaatcattacaaaattatctctcagaaggtgactggactaacgcatttttgcttgccatgaccttggatcacccaatgagattgtacaacgtcttaagacaaagtgtagacaactcaaatgaggatccaaatgtagttttcaacaacgaaattgacgaggttgtgtcgactctagataaagatcaacttcttcttttagtgaaaaggtgcagagattggaatacaaatgcaagaacacacacagtagcccaaaagatgataaggtgtattcttctaagacaaaatattgaagagttgagcgaaattcctgggcttgtaaggatcgttgaatcaataatctcatacgcagagagacattactcaagaatggataacttggttcaagaaagttatatcttagattacgctttagttcaaatggacaaattgctataaagaatgtaaatatagcactagtcgtcatgtagatatatacatataacagtacaacacacccaccgcatcaactctgaatagataccatatccagtcaagggccatccatcagtagaataataagtttgttacccggctttgagttttagacagaatttgtttccctgcaaaagaaacttcatcaaataactagacgatgtgaagcgatgagatgagatgagatgagatcggctctcatccttcttctgttaaaaggtgacttcaactgtgaatttttgacagttatactttaaagttaactctcctccatattaacgagaagctctatcggaaactatcatgtcagagggacatattgcagctattagcaagacgaacaagaggaagaacagaagaaagaagagaagaacgcaagacgtgtccgactcaagttctgattccagctccgattctgaaaattcatcggtagaagataatgatactaagctcgaaactgtggagaaagctgcatctgatgttgaagatgtaacgctttcagatattgacatggataaagaagaagatgaagctgcattggacgataaaaaagccagccgaaaagagggaagcgtcttgtcctcggagactgtggacaaattaaataaagtgggactaacaacaagcgatttaactggcaacaatggcattcatctagggaatatcgatttgaataagatgtctgctacgttagatgaaagcagcaataaattgctagagaataataaggacaagaacggattaaagaatcaatatttgagtatgctatttgagagttatggtgatgacatgaacgaattgagaaacgcaccagatttcacttcgaagacccttgtcatgctagcgaatgttctaaaagacggaggagatatgtttgatttggagaccttgaagacaatagtagaggataaatagtgtttggatctatctagcattttaaaaacacatgtataataaaataaaaatacaaaccatctatcacgatacagctagaatgaatcaaataaagtctggacggcaaattgatgatttggagtaagatatgaatacgtattggaatgataaaaaaaaaagtacgtgatactagggaacgcttaaaagaagaagtaaaataaataagagatgatgaggatgattatgattaattaattttgttttatttgtgactctcattcgatgaccttaacgaagaaccaagctgcacctgcagcagtcccaccgactgctatcatttgtaagccttccagtaactttttctgcagggtacaatcgttcattgagacttgggatttgaaatatccgaaccagaacaacgtgaaagtcattaatgcaatagagatcaggagaccggttcccaccgtttcaacaaagaaatatggtattaacgggacgaacccaccggcaaagtatcctcctccgatcgttagtgcactaatccattgtctattatcatcgggttcatctaaacctcttccgtatttgataatgaaatccaccataagttctgggtctcgttgcatatctttcacaaacgatatcactgtattttccgagaattctgggttcatttccattagtatatcttcaatttcatggtttattagctgagtattgctataaaatttccttttttcttgcgacacctccgatttatagtaatcactttcagatttagcacccaaataaccaccaagacccatagatatagcaccagagatcaattccgcgaacccacctgtaatcaccaacttggaatctcccaacgaggaaagacctgcggtcaacgcgaaaggaaccgtcaaaccatcactgagtccgataatcatatcggacataactcttggatcaatcttaccgaacaatccagacgtaccatcatcctcattgtcataatcgtcaaacccacctgtatgctttgaggattctatatcgccatcctgtggtgaagccgagtatcgatgactattcaaattagtggtagaattcgaattggaattagaactatcggatgatagtaatggaacttcctgatttttcgctacgagttttgacacagcgtttttaattgcaaccacggacatgtagttctagtttctgaatatgttataatatattgttattctggtcttatttttaccaaatagttaaaattgtatagcagagcagtactgctgataaaccaatatctacaaataaaaccgttcttgtgttttgttccccacttattccaggtttgttcccttggtttcacttctcaaaaaatcacctcaactttattttctttgaaaaacgtctatgagaattcaaatagatactgcgagtgcaaacaaaaaccaaccaacagctcaagcaatgtgtctgacacttgttccaatattgtttctctaaaaactaaatacagaaaactgcgaagaagtgcttataaaaaagtgaataaaacgtacaagctttatataaactttgtatagtaatatatatatatttacaatgaattgggaaaaaaatgaaaaagattacggcttggcaaatagcgccgctggggcatagtagtaaaagtttaaattccaaatcaatttgaaatccgttatataacggtgagtagtcccacggtttcccgtgcctttgaaaacctgtgtttctgtgtggctggtaacgtcagcattacgcacggcgatttcattggacggcagaggaaaaaaagaagaaaatttagtgtcacgtggggatgggaagcacgtgacagaaagtcacgtggtttgtcatatatgtaacaacaataccaagatgtcttcgacatcttggtattgctctaatacattgatcaacagatgcccgaatggcctatttgtgaagaaaaaaaattatattacacacgttatacccagataagattttaatttacatatggatcctttgcaggatgatgatgatgataatgataatgacaactcgcctaccgtttaagcttgagtagaagaagagtacttggtaacagctctggtaccttcagaaacagcgtgcttggccaattcacctggcaagatcaatctgacagctgtttggatttctctagcagaaatagtagatttcttgttgtaagcagccaacttggaagattcagtagcgattctttcaaagatatcgttaacgaaagagttcaagatggacatagacttttgggaaataccagtgtctggatgggtttgcttcaaaaccttgtagatgtaagaggagtaagtttcctttctagccttagttctcttcttagatggatcggtagaagaggaagtcttcttagcagctggcttcttttcagctggagccttggatgctggggccttggatgctttagcagacattatagttgtaatatttgtttttagtaatgtgatagtactggttttcaaataactagtgcttgtcgagggtgaattacagaaccatatatatttctaatagaaacggataatctataaggagaaagggtaaaagtatccatttagtcagtctctttatatacaatttggttcttcgccatagtaaaagcgatttgccttccttaaattgtgtctttggtacttgttttttttgtttttcacgctaaaaaggcatgtcatgaccacagcttcgctgtggtaaaccggtttactatggcggatggagatattctccgcgcgtaaccggtagcacggtctacgaaaaagtttcctttttcggaaacaaccacgggagtccatagtaaaagggaatccgttgattgtttgaaaaaatggttcctcgacatctcaagagacaatatattaacattccaggagtttcacggcacaggtgaagctgtgagaacagggggtttgttttcgctgccgctttttctttttttacttttgttgtgtgagcgtgtgctttgctcagtgacacagtggcactaccgtgccaccgtttcttatataaagaggtcacttcttgcactttcagttcctcttctgttcctagtttagctcttcgtattgtttgttgttcatcatcacagatactactaaatcaaaaacaacacacaaatcaaacactataatacaatataaaaaatgtcaggtaaaggtggtaaagctggttctgctgctaaggcttctcaatctagatctgctaaggcaggtttgactttcccagtcggtagagttcacagattgttgagaaagggtaactacgctcaaagaatcggttctggtgctccagtctatttgactgccgttttggaatatttggccgctgaaatcttggaattggccggtaacgctgctagagacaacaagaagaccagaatcatcccaagacatttgcaattggctatcagaaacgatgacgaattgaacaaattgttgggtaacgtgaccatcgctcaaggtggtgtcttgccaaacattcaccaaaacttgttgccaaagaaatcttccaaggctaaggcttctcaagaattataataagcctgagcaaaggggggaaaaaaaagaatggaatgcatacaaattttattttaatatgaaaacaaaattcatcgggtctgtcactaatatatctttcttatgtttattctgagttggcattggcatcattttaaacacacaaattactttatcaaacaaggagaaatggggggattctctgtttcatctctttgtatgggatagttattttttatttgtactatattttaaatatatatataaactacttcatcctacgttatgaggtatatctttaatcgtcatgaatttcgggttagattactttctttcaatgactttcaattctgtctgtgttgttgattttgacacattattgtccttttcctgtcttttaacattgaatattcccttgaatgtattttagattaatttggacaaagttgttttagatcaagaagagagtagaaaagaaaaattaattactattaacggtataactatttagtgttgatatgagtcttattagatttaaataaccttttgaagaacgaacctttctcgttcttcttcttgcttttcgtcttctcattgatacgtggggtgttatcgatggagggggacgaggctgggatcacgtgatcgggattgcctggttcgtttacatcgacaggagtagcagcagtgctagctgctagcaccgtggtatcctcagtgacgacaacggggttcgccccggattcgtgtcgaagcgaagaagaagaacttgtgttattattgttattgtgattattgttattgtgattaatattatgaccactggcattagtgtcaaaattgtcagttgttccattggacggagcgacgtccggtggttgttgagaatattgttttccacggtgttgttttggtggttgattaccagagttctcttggctgaactggacaaccctatcgagtatactcttgacttttttctttggatgtcggctcttttcatttgttggaatcgccgcagtaggttgttgcaattgttcgtgttgaatttgttcctcacgcgtgggcaagtgcagtgtggtcgggagcacatgtggttgctcgacatctgcatcttcaagtatcggtgtcatttcgtttctagatccattgtctgtactatgcgaaactgtttttgtaggatgaccatatttctgttgagcaatctccaatgctatagcatacatctcctcttggcttagtgtcttctgatcagatgtaggaacagtagggacggcaactgcttcattccgtttcttacttttgaatatggattttcttttcgtggcgttattgtccggtgtagcttgatccgtagtatccttttctggttcaagttgtgcattgggagtatctctcaaagtcatcctcttggacattgtacttttccttccaactgatttcgcttctgtgttctgaacctgcgatataccttgatgttgaacttcttgctgctgctgcaccccctgtttctggaccaggggttttcttgaagtgtatgattttgaattgttatcaacatcaactttattcacttttgccaggaaatggtcctgatcatcttccgcaaatgcacctgattcttcaacgacatctgatgcgtcagtgaagtgctcttccccttcctcttccgaatcacttctgatgttattcgcagctgagttatttatagcattcgagttgaaattggccaatctctggtttgtccgtggttgcgattcggataacggagcagcaggaggagtggcggacagctcatcggagattgggaactcatcattttcagcaaactgctggaaatgaaactgagggtcttcaaccagcccagcagtttgcgtggtagtttccacgtattccatcccgttgatccttcttatagtctgcgtcgtgatcgattgcgttctgcccatcatatctttaacctcttgtgtcttgatgataatagatccgttaccacctccagcaaatgaaccggtccttgaaccaaccctggctactgaaccagtcatagaaccagttctactgccaacaccacgactggaagctgtacctgttcgtggtatggcagaaacagaccttctattcccgacattaccggttcgaggagcgtatgctccacgagcagtaaaactgtaacttctaggaatataagacgattgctgttgctgctgtccaggatgacccatccggagactgttagctcttgatatatttgtatagcctctttctggataattcaccagggatccagcccttgcactagcagcaaaggccgcatctgcagaaagctcgtggctcttaaggtaattatcaccctgatttacagaattaccaccgctaccattgtaatgatagtcatacctggataagtctggaaccctagtggcttttctcctgtttcctaaattcataccaaataccattgttgaggatttcgatgtatactgttcagtatagcactttgaccagagaagaatagtgatataagccgagcagcgaaaagggtataattaagcttcctcaaatttcgctatttaaaggtatattatatatatgtccgtatttatatacatgcttctttgtttatatcaatgcatcctttattattattctgtgatttatgttccatttttcacttatggaacaatcgaaatttgctatctctgcgaatttatatcgagaaacggttagaaacggctgtacaagaaagcaaggaaaccagggtgtttgcttcgagacagaaaggagtagacgcaatatgggacctgattcaaaatagcagtctgttgcaaaggacattcagacaggtttacgatggacaagtttaccaggtaagggtacgatgttttggtccgttcggaatatgaacgcacacaagatatatatgtatgtatacagtcacgtgattatttataaaccacgtgacacagaccaaatcacatttggggctgtcatcaacgacgtacaaagtgatgaattctctctccaactcactcagctcaattacgcgtgccactggcctcgaaacgtgtgatgttcgtacttgtatcaatgacgacctctctgaggtcgtcatacataactatccaaaactgaattccactcgtaaccgcatttcccccttctctcttggatcaatggagtcacttttttcattccagcatgataatttcaacatcaaaattatataagtatgaaaaaaaagttgatgataatttgaacgaagaactatattccatgtttaacctgaacttgaaatgttataagaatttctgacacgttttgttttcttgcgtgattgcttcaatgcaagagtatattagtatattatatatcttgattaaatttttatgaattattttcttgtactttaatttcaggtatatcctcaacgatcagtagagtcataaaactacaaatataagtaaccagcgatgtcccaagatttgtcccatgttccagaatccatcagaatggtcttgattggcccaccaggtgctggtaagggtacccaggctcctaacttgaccgaaagattctgtgcttgtcatttggctaccggtgacatgttaagatctcaagtcgccaagcaaactccattgggtattgaagccaagaagattatggacgatggtaagttggtctctgacgaaatcatgattaacatgattaaggatgagttgactaacaaccaagactgtaagaagggtttcatcttggacgggttcccaagaaccatcccacaagctgagaaattggatgaaatgttggctcaacaaggtagaccattggaaaaagccgttgaattgaagatcgatgatgaattgttggttagcagaattactggtagattggttcatccagcttctggtagatcttaccacaaggtcttcaaccctccaaagactgaaatgaaggacgatatcaccggtgaagatttggtccaaagatctgatgacaacgtcgaagcattgaagaagagattgacttcttaccacaagcaaaccgaaccaattgtcgatttctacaagaaaactggtatctgggctggtgtcgacgcttcccaacctccaaagaccgtctggtctgatatcttgaagtgtttgggtaagaactaaacttgaatataaatttcactattatttatggtgtttcccattttataacgaatcaggatatgaatcaaaaacaacaaaaaagtagcatagattatgatcagcacctcacccaagatatcgtatcttagcttttttttaccttcttttggtggtgtatagtttatgtaacatcaaaagtacagaatcatttaacgataataccaatagtgttctgttttttaaaatagggaacaaggtaaatgtagtcagagaggcttcacttacgtgcaagaactgacttttttgggggagaataagacaactccagcgaccggaatactcagaagcgagatcgacaatgcattactctatccaactaatacgcctacctcgcaaaagattttaaaaggccagacagccatcactcacgggactaatgcttaaattgaggcggtttatactcacttctacttccagtcttatgttatttcattttccagatcaaaatgtgcataacagtgttcagcggcaggctgggaaatgtcgttgtcgttctgtaaagaaacattgggaaaaaattgcttctagaagaaatacaactacgtcttgttctgtggactttgtaacgtttaatagggttccccgcatttgttttttcgaaattgcagatctgaagcgcagagacagcgtaggatgtgattacgtgacgattatatgcaactggccaccataaagcattctacagtggcagtacaaggttacaaacgaattatataccgggtacttgcaggtgtatttgcctgaaaatctactgcagtatatttaatgtatctagggaacataatcatgctctgccaatgagattatctaagaaaaaactgtccagtgtcactgaacagagagaaatttgatgggactttcctgtgaggatctcagaattgatatgaatagtgtgttcagtgaagtttttgaactcaggaagtaaataatcaactcaggttttacgcctattatactattgtacgcgtcgacattttattgggcaggtttctttcggagttttcatatatatgcttggattaaaaattatccagctcgacctctttgcatcacatcctttattgtttaagtagtcaattaataatggtacacacgtcagtctatgaaagccaggtgattgtgtattacgcttcggcaaaagtgcaatgtcacctcactccacagtagaatttcacgcaaaaggtaaagtattgaaatatcaagcccaaaatacatccatacattcaactttacaccgtcaaatccctcatccctcatctacccaaatctctttgttatatctcacttggtgtccttgtaattactcaattaggcctttttgctgacggacatatatctttcacacttacttaaaaacgaaaatgattcatcttaaaaaaacacgatgattagatacaaaatattcaagaatagagcgcgttaacagcaactggtaacgtctttgatctgaaatccaaggtgaaatacattattaatcttgaatttaattgattgatatttttccagggtcctttgttgctattcagcatcttatttcgacgtaaaaaaacaggggtacttttaaggttatactgacattgataatgtctaagacaggtgctaatctcaaccctaacacctctgttggtatggatttgcgacagtatagtaaattgatacattcgaataataaatgtgatatcaaacaacataaggtaaatttggtgaagaaaccgaggggaagacccaagaaacacgtcgagacgaaattatgcggaccaaaccttgtaccgaatttaaatggttctggtgacttcagagtcaaaattcaggaggaagtttctatcaagcttcgatactgtttcaatacaaaacctacaaactggatgtatttctggtttatttcacacgtcctgccggagttctcatatcagatgtggtatagtatcgtgcaattgaaacatagacaagatcttgttgaactcatgattaatcggtttgagttcttgaaacttattgcaatgcaacaatttgctcagggtagcaaaaacattgacagaacttgggaatctaaacggatttcatatagccatgatcaattggcgtgtttgtttcttgaatcattcaatgccatttcgatggaaaattggaacgacgaaattttaagattacagaataggctgtgggcaaaggttaaggataagtcaataagagattcaagatctgatgacattttatctattcacgataaagtgtttttgttagcagaaacttgtaatcgccagattactcctgccatcgaatggatgatcattacccttgaagatatttatgccatcaataagaattctatgagtaacgattttaaaggaagctcaactgctgctaatatacctattctgactaagaactataactgcaataagaaattttctgccaatgataacgacgtgcgatctacaatcccagtactttccattaacgcgtctgattttcaaacgaatacattgggcatcaatgagcgattgataaagggtatcacagcttgcctgaggggaaatagaggtggaaaaaccgagtcttatgaaaggatacaagttccagtactttacgagttaatgatgcctgagctaccaaagaggaacctgaaacgtctattacaacattctaaagatattttcttaagcaaattacaattgttggataacaacgaactaagcagttacttaacagaagggagtcaagacgtacaattcgagatcagttatcgaaattgtgttctttatcactctttatgtcagtcttcgttcatcgctggaataaaacccgtagtgtcaagtaaagaagaggaaaaagaagaaggtagatcacttgaccacatcaaatttagcctggagcccttcgatgagctgccagaggtgtgtatcgaaactgaaggttttacgccagctagaaagctgtggcatgatagatggatgtcagaattggcaaaatcaaaggtctacttcgtagaaggatttccaaagggggccactgaacatgaacgaaagtattggaacagattagaagaattgcttgttcactattttaaacatttcggtgtcactttcatagggttcagtatcaatgactttgaaactgtcaaattaccacctccatgtttacagactagatatgtcatattcagaagagagggacctttgaagatgaacaaaaacccaaggctatgggactacggcaaggcaataaggttcctccaggatatggggcttgatgtgagttcattgcagaacattttttctcttttacaagacggaactttgagaaagaggaagatcaagagagatggaaaagggcatcgttcttctcaaaaaaggtttaaaagaggtactgtaacggaagagaagctagtatcaccaacattcgactggaacgaatctttggagcaagtgaaattcgcttcctcagcaataactggtactcctcaattggccagaccactggtcacaactggattgaggaaacatgtaaaagaggacagtgtagaactcgatggttcaattgagaaagacacaaattcgttgtcagtatccgggaaactatcggatgcagaactctctgaggataaatcagttattgacggtaacacaaccatatgtggtgctgcaagcctgaaggcaagtagattcgaaccacctcaattcgtagctgaatcttctcaattgtcagatatggtaaagaaacccattgaggagcccgattctttctacacagcgccagaaaccactgattcagatgatgatttagaaaccgaagatatctttcaagaaatatcaagccatgcaaacaaaacctggaactcaactaaaaaccagataccgaaacggtaccatggcataatcagcggaatgcttgattccatcaatgaatttacggtctctaagctaatagaagaaaaccagcaatggtcaaatcttttctcggaaagagatcaattgatccataccttatcttcaaaactgatagagaaagaaaaactcgtagccacctaccagggaaaattgcaacaaatacacgcagaatcctcaacagagaaattgccacaatgacgcgtgtgctaacactatatacactctagctattacaattataatcttgcatcatatctatatataaacataatacacatctttacaatgcgtagatgtaaaaaaaaaagtgtcaatttaatttagacagttaaggtgatgaatcagtacaaaaacataccaagaaaaccggtaaaagtacaagttctaccgtgatgaatgtatgtctataagggcatcttttaatgttgaagagcgagaaatctcaaaaaaaaaaaaattcgaaaaatcaaaaaatcgaaatttgaaaactttgcttagggagaaaccctttgttttatcgaataaaattcattgaccgtgcaaagtagtgggcgacacagtttgaaaacgcaccttataccttatttaccgacaccatagatagttagggtgtggcgctggaacataacttaggtgtaattgtgttttacctagcgcagacgtgtcgagtgttaacagccgctaaggagaatcgttaaaatttgattgatagttttacattttgatttaaaacgccagaaccatttttcttattatcgattgagccacgattaagctcgaagaaaaaataaaattagggttctgcaacaataagctaaactggctgacattaatactgtactcagatttactgtgcgtgcttcctttattaattgtatttggacataagcagtctcattgaagtgtaagtaagggcagttggtttttttggtgatgatgaataaacatgacaagcaacggcatccgtcgcagaaacagaagcataggaataagcaacgacattttcagaaggatcgtttgggcaaaaagatagattctaagaaatctgaggcagataatgatcagataccgattttgtcgtttctgcgacaaaatatggataccaagcaaaatttgacgtcaagaccgggttcaagttcgactccgaccactcctcaggtgtatagacgttccaagactgtcaattccaaaactagtcgctctgaggaaaactccaaggtgcggacttcacaggtacgatccggttgggaccgtcctttttcgtcgcgacagccatcaccttcaccttcacctgccgcttctggatcgcaatatcaaaagcagaaaagctacactaaccggaaaagtagtacttcgcatactgagatgttgaaatctctatacgttggtgatagcaaggtttcatcaccgccacaatcgaatatcgataaagctcctcagaggaaacccttggaaagaacagggttatcgaagcgtgttgtcgaagatgaagtgctgagaagacaacagtccagtttgtcttcatcgggacgtatacacaagcacatagagtctccatttcagagaaattccaaaccggttagcaagagcattgttaaggcaccgaacaaagtcaattttgcatttgaaactagtttgaacgatatagacctgaacctattgacacgcgcaagagcatcgtctggtggtactcccacatcgaaggggtcagcagcggttcctgccgctccgaaaactaaaaataagacggactctcaagtaagtaagatagccaatgagatacaaaattctaataaatcccgaatctctaaggcaaatagtcccattcaaagaacaactactactacatctaacattccgagcgaggctaaagagttatacaacatgctctcatcgcgattgaagagaagaaatgttttattcgacaagaaaggtacaatcaattctgaaaacaatgacaaaactggcgcatcagtaaaagtggaatcttcacatgtcgaaattataggttcaaagcgtgatcacacgcatacaagttttatggagctaccatctatgcaagccactattgcggatttagcaaagaccacttcgcttgtaaaagaaaacagcgcacaaatagaagttgatcgtaatctaattggccctgaacgttccaggaaaaacgaaaaggaattccaagatttggaaacaagaactagctctccggcaaaggaaagtctagcgtctccttctgctgacacgcctgaaagaaaagtgccacaacttgatttgacatcgccatcatttgactccactcctggtgttacagaaaaaatggatctcaaagaagtaccatctcccgagtatccttcatcagctggacaagccgttcaacagtcagaatcatcacaaatatcacacgttatacaacaagcagagggggcggattctggctcacatcacggaattcaagttgaatcaagtgaactgaacatcccaacgatatttgagaagaaagataacccgcaagcagcttctgcttcaggtaccttccatcatgtcgatgaaaaacaatcaactgaggaaaccgcaaaacttttggctttatctgatacttcatctgaaacgtcttccgatggtagttcctcaggccattatgtaggtgatttccaattattgaatacgatgaaggcaagaatggtcggtcctaaggttgcgaaatggaaggcgtttaacaaatctaaatttaaagacttgatgaaatatcttatcgctgaacatacacctcttgcagcaagatcagatgtcagctgctccaatgatatatgcaatataagaaattacgagagcgttgaagttcaccatttacaaaaacttcccccaagattgcggtatcttgaattggaatctccaagtaataatttcatcagtaaacctttgagggccaataacagagttgagaaacttcgtaaagatgagttatacaacggatctaagcaaaaaagaagaacccgcgggtcggcacccgattcagagggaagcaaaaagccactgatagagcgacaaattgaagacggcaatgtatctgagaaaactccccaagaacccactacttctattcctggcgaaacagatgttaatgaaaaagtgttggagcccatcgaagatatcgaaatgttacctacctttatttcttcatccaaccgtttagagccggacgctaatactttatcggctcatgcattaccgtcaagtgttataggcgtcaaaaagcagccttcattgactactgtgaacaaatttccagcttcttttgaaaatggacttcaacctgacaatgctcaagcgtcaactgagatagagacaaatgaaggtaactcaaaaaaaggtaaagatgagttacattttgatcctgaaaaatgtgaagatgtcactcagttcagaaaagaatatctagcattacgagcctcgatatcgaaagacgatacctgttcgtcatctttggtaaatgaagatttaaacaagactgaagttatccagaacttaacctctgaaattattcaatctgagatgaaaattgcttcactcgttggtatcaaccaccaacttcgcgaaaaactagaggaacttgagaagatccaagcaaaattagtccaagaacttgatactgtacttctagaatctaaagggtccttttcggcaggaactgccaaggaggctgaagtgaacaataaagataaaactgaatcgataaataatgagcaggctcgagaaaagtcactaacagctgctcatggaaagctaattagtaaggtagaaaaagaccttgtagaaatagaggcgttgaacaaaaatgtaacagagcgtttgtttgagatcaaacggattaaagatagggaagtagagaatcatcctataataaagcagctcagagacacacttgaaggtgaaagagctcactttgaatcacagttggcacttgaaaagcaaaaggtgtcaaatttaaaggctgctttactgagcagacatggaaaaaatgatatcaatgaagaagttaagccggcagctcctttggacggaaagaaacttgaagaacttcaagcagaactgtctagcactaggttatatgcacgggctcaacataatgctgcaaaacatctccagacagaatgctctacttatcgaaatctattatcagaaaagaaacataagtataatgagttgaattctaaagttgcactagcttcaaaacagtgcgcacaattgcgcagcacgaatgcacatcttcgtaataaactccagagtttagaagacgtggtttcaaaaatatcatctaatacaaaatcaaaattgaaaccgtcaagctatgacagccaaaacacacagcgtagtatttctggtggctcagaagtgcagcaatcatcattgactcctgcgcagtatgaacaaaatgccccaaaaaagctaccaaaatctaacggggcgatcacatatattgatgagaatgaaattttaactaaagacattctaaacgacgaagtaaggaaactgaatatgacagtattagatctacagcgcagaatcaaaacgctaacaaaacttgaaacgaatgtaggccctttgagtgtattttgtgaaaaagaaaagttatcaatacgtgatgtagtggaccgtcttcactggattaagagattagagtcaactattgcaaagatggctaatgaaaaagcggacatgacagctaaagtcaaggatcttgaaacagcgttgagtcagtctaaagaaaaagtggaccgttacgaagaatattcgtcaaaatcccagaaagtcgataaacctcggcctaacggggaggatcccgtcgcactcaaagaaaccatcgttcggttactgaaggaacgcaagaaacttaccgctattttgaagaaccaagctgagtcgaaggaacgtgatccgaattaaagcgtgtcgagataaagaattcccgtaagaagaaaaacaaaatccaaagcacttctatgcaatagatagccgtaatgaaatagcatatgttttctataatgcagttgtaacatttaggaagtatatatatatataaataccatatagcactatattatattcgtacttccatttagaacgaaatttgtagaagaaaatggtacgaaattcatgccgataagccaactagagttcgaatatacaattgatcagcactagctattcatcaactcattgaagcagctcgttaaaaataccaagatctaattgaagattttggaatgatggagatgaggaggtgtttgactgttgacttttagctgcctcataataacaagtggcatggaagaatttgtctcccacctgtacgcagttgctccaaatccattctcccagatcttcatcatatttaccatatgtggattcggtacaaataggacactggaacttcatatctgtggcataatccggtactacaatatatttattcctgagtttagtatagattgcatcagtagaatcttccctgttgttcgcaaatgtaggttgctgttcagcagctccagtatcaatatctgttgcaatgatgtcttcttctttaaagtctgcccattgattttcatccaaataccaattcctggattgaatgaccttggtagatgtagtggtgttggactggatacctttaatcttcttgttgacacggaaatgccaatcaagatgttgtatttccaactccttttcttcaagagtattaccaaatctcttaccacatatactacatttattaggttttgcccgatataagaaatgtaccaacttttccgtaattggatggttatcattaagaacaaactgttgagaaagctgaaggacagatgcgttcaaaatatctaggttttgcgtctggcgttgcgcctctagatcacctagaatatcctgtaaaagtgaatatgacggtagttgcactgtcttggaggaatcaaattcaggttctaatttggcagctaaggtagtaatagatgcttctccaggttcatgcaagagctctttttctctcaacatgttaaccaaactagaaagcttattgagacggttagagttggtcagttggttcaaaaatggagcattaaattgaaggcttcctccgaacatcgagccgttgttaccgttcgcctggagtgagccacgagacatatcattgtttacagaaccttgagatgatggcggcagaaactgagagttattttgtaatggcaactgctgctgctgctgttgttgttgttgctgttgatgttcttgcgcaaaaatctgtttgagctgctgatgaacttgcgacaaaaactccggtgccaaccgttccttctgcaactcttgtctcaactgcttcaatatcgctacttttgcctgcaacttggcgtcatccggtgtacttactagcttcgactgcgtaatcagcgctaatttatcaatatccgacagtaacgatttcacagtaatattcgacccagccggtccgttgtgagcggtatgttgttgtatcgccggcggagtagcacttttctgatgcaacgcactagccttaatcaaaaaattctcgatgctgttcaaagaactatgatcgaacatcaagtctcctgcaggcaatggcaccatccacgttttgaacattgaaatcatcttggttctagtctgattatccacaagtaaataagttttacggaacaatttatgcaaattcttagagaaatagatcgtatacggagaaccagcgttcttacagatagaatccattacatagaaagtgaaaagcttctgactaggaacacatttctccagtctattttcaatcaaacccacaaactcttgtgctaaactcatatgttcctctgctaactgcgtcaaggtagtaattataggccgagagttaaacgtaagaccatccaaagtggtcttaaactcctctaacgcattagaaccatcttcagaactcatagagaaatcccaacaaaactcggaaaaaagtgtaccaaaatatagcaaacaattactattaccacaaactaagcctctggatactagtaagcgctcaaataatgaatcatacggcctctattccttgcctctgctcatcgtctttaaaggtttccttatcctaatcctgcatcttgtaacgttttgctcggttgaaagaaaaaccgaaaacatcaccagatccgggtaacgaaaccacacttttttcttttaaaaaaaacctttcgagatatcgatcaaagattctttcaagaatgaatcatcactgtttttatctatcttgcctttacgtgcatctggctcctttctttctcgtgcgaaactttcaacaacgtttattaagagtagaagcaggaatctcactaggtgaaaagggtctttcttttaatttcttatccatttgaactaagaagagctggaaaaaaagatgactaccaacgataagaaacaatcgggtttggcccgtgtcttaggttcagcttctgctggtatcttggaaattggtgttttccatcctgtggacactatttccaagagattgatgtcaaaccataccaagattgcctcgacctctcaattgaacagtgttattttccgtgactttgcatctgaaccattgggtagacgtttgttgtctttgttccctggtttggggtacgctgctgcctataagatcttgcaacgtgtttacaagtacggtggtcaaccatttgccaatgagtttttgaacaagaacttcaagggtgatttcgatcaagcttttggtgaaaagaccggtaaagccttgagatctgctactgccggttctttgatcggtatcggtgaaattgtgctattgccattggatgtcttgaagatcaagagacaaactaacccagagtctttcaagggtagaggtttcctaaagatcatcaaggatgaagggtttggtttgtaccgtggttggggttggaccgctgccagaaacgctccaggttctttcgctttattcggtggtaacgccttcgccaaggaatatatcttgggtttgaaggattacggtcaagctacttggagtcagaacttcgtctcttcgattgttggtgcttctgcttcattaattgtcagtgcaccattggatgttatcaagaccagaattcaaaatagaaactttgataacccagagagtggtttcaaaattatcaagaacactttgaagaacgaaggtttcactgcattcttcaagggtttgactcctaagctactgaccaccggtccaaagttagtgttctccttcgctctggctcaaactttgattccaatctttgataacttggtctctaagaaataaaccttggattcaaatacaaattcatgtaaataatgttattaattgctactattcaattctttttttctatatgtataagtctcttcaagtcgctggaatgatatccttcatcacgctttgaactatgcaaagctgtttgaacaaaggattcttgtattcttgagccatcttaatggcaaacgtatcaaacctgttgataagttcgtcaaccagttcttcctgagacccgtacatgacactagggtcctctttcgaggattctatcaactgaagatgccagggaaaatatcgttcacatgcagtttgaaccatatcgggagtaatgaacgaggatccagacgtcaaagcgatccatttacaaagcaaagtcatatcactgagtgacctagaatgtgctcctccaccctggctaggtttactaagcctatgcatcctaaggtgaactattaggtctaatatgtaccttcttatcgaatggtgcatatatacagagtccactatggattctgcgaccacggaatcctgccattgacccatatcttcaccacatgcgaaccagaattgatgccttagataagggatcataagtggattatcttgtaacactagtataacaggaacagtggatttgtgcaaccacagagcaaacctattttgcaactcataatcgatttcagcagtaccactatacggtactagataacatgaaatgccattctgcgtttcagtatccggtaagctatcaatactgcatgattgtggggacggtacggcagggttatccatgtgagatagcagatcggatatggactttaaaccttgatcattagaagttccagtgaaacaaaccacatgtcttttcagcaccaaacctgcacgaactccctccgaaatggacacaagagacatggtgaacgtcgagcttgggtcccgaagggaaacaactggctaataacaggtatatcaagtattgccaagtgtgtcgagatgacggtgatgatatattgtgagttttgggaatctatcgagcgttacccgcacacgtacatagtgaaagaaacgaaagtgaaaactttaaagcgatgagatgagatgagataggtttgacacatgacgttcgaagagctgaatagactatcaacggggtcttaattcttcaacagagacacagctcgagtagaaccagaacgcgaacaacacaacaatgggtaacctgcagcactctgtgcagaagaaacagcaccgtgagcggtcgcaagttcaagagagaagcaagtttgggttcttggaaaagcacaaggactatgtaaagcgtgccaaggactaccataataagcaaaccactttgaaagtgttgaagagcaaaacgaaggaacggaacccagatgaattctattttggaatgaactcaaagaaattggggtctgatgggctattgataaccagcaggcacggtggtgaagaatccgatggggtattgaacatggatcaagtgaagcttttgaagacgcaggacagcaattacgtgcgtacgatgaggctagtggagtcgcgtaagagtgagaagaagaaaaactcgatgatgttcacgagcaatgggaaacatactgtttttgtagaggatcaagaagcgatggaatcattcacaccggaagaatatttcaagaccagtacggatatggttgatcgtcgagagaacaggttgagaacggatcaactagagggggtcaaactaggttcgttgcctggaaaagcacaaaacgaggaatcgctacgcaagaagaagttgaagaaatacaaggcgatcacgagacacatggaaagagagagccagcttgctgcggtagaggaacgaatgaatttacaaagagaagtgatgaaatcggggtccaagaagaagattgaagtgaacgggaaggtaacgtacaagtggaagaaacagagaaagaggtgagcatgcctgccacatcacgtgacaaagtcacgtgatgtcatcctttatttagacacacataagagaccgagacagaagaggtatgtacaatagatatcagagcctcttggtgtcacgtgtgcgtgacaccaagatcctccaccgaccaataacagatgacttagtcaacttgaggtaaaaaaaaaaagagctaaatgacaaacggcccatttcaaccccaagtcgcctccgattaactactggcagggcttgaccttgcaattgctatataagtggaacaaccgttaaacaggtttactcctattcaactgtttaacctttaatctacagataattggagaactgtacctactataagggtcagagtggagtaagtatataaaatgagagaatgacttcgaattaagggatagagattgaatcgatatatatatgtaagactgtgtcgataagatctatcaacggctactaatagaagttcaacacccagaaattgattgttttggcctgaaatgttaatggcagggaatcaagtatgaagtatgaagtatgaagtgtgaagtgtgaatcccgtaaaatcggagaaacatgtggtcacctggtcaaggacttaagggaacacagcggttgttctcggcattaagcggtactattgtcactttgtaatggcagtccgaatcacgttttattatatggggggggggaaggaacgacggtacataagaatgaggggcttggttgcggtgtacgggtttagtacccctctcgtccgtgcaagcccaaagacaagtttttgtttctttttcgtatccatccccagaacagtgcgcagcaaggaaatattccgtcatgcgtttggatggtttttcccctattgaggggcaagtgaggggtaaacgaacggcgcctgaaattttcccgctcaatgatatgaataatcagtaggatctccgagtttcgcaagaagcagtaagcaactccgttttattgcgagacaacactattgtgagaaaaggcactcaaaaagcgacctccgttaattgatgtcaactggcatcaatttgagatactttgggtcaatttgcagtgtgcattcgcattctttgtgttaaaatccttttccccagaagtcggagtttacaggacacagggtgtggagcaattgggagagctccagcagggctggagctctgcctctgcctctgccccaggtccaggtccaagtccaagtccaggtccagcgagaaccggagtgagaggtgtgtgctgtgccttccactaaacgaaccagtatcccaggtctcttaagtttcccaaatctcggcatggtcaggcctctccactgtagcagccgcagcacattttttttttttttctctcttctaatggatcaagcatcactacttatcacaatttatcactttttccaatgatgttgccattgcccttgttggccttctcgaactagtccgtctttctggtttaacttggtgagggaaattcttagcactggactgcgctgtgatatgacctgttaaattataaaaaggagtcgtttttcaattgacaattttttatcattgtctctgggatcaattggtttttcttcctctctttcgcttttctcccccaccaacaacacaacatacaacacacgcaatgttcagattagcccgtgcccaaactgctctagcgaacaaagcttctgtttccagaagctttttgagattaaactcttctttcgctatcccagaaactcaaaagggtgttatcttctacgaaaatggtggtaagttggaatacaaggatttgccagttccaaagccaaaggctaacgaaattttgattaacgttaagtactccggtgtttgtcacaccgatttgcacgcctggaagggtgactggccattgccagttaaattgccattagtcggtggtcacgaaggtgctggtatcgttgttgccaagggtgaaaacgttaagaacttcgaaattggtgattacgctggtatcaagtggttgaacggttcttgtatgtcttgtgaattgtgtgaacaaggttacgaatctaactgtttgcaagctgacttgtctggttacacccatgacggttctttccaacaatacgctaccgctgatgccgttcaagctgctcaaattccaaagggtaccgatttggctgaaatcgccccaatcttgtgtgccggtgttaccgtttacaaggctttgaagaccgctgacttgaaaccaggccaatgggttgctatctccggtgctgccggtggtttaggttcccttgctgtgcaatacgccaaggccatgggtttgagagtcctaggtattgacggtggtgatggtaaggaagaattgttcaagcaatgtggtggtgaagtcttcatcgacttcagaaagtctaaggacatggtcgccgatatccaagaagctaccaacggtggtcctcacggtgtcattaacgtctccgtctccgaggctgctatctccatgtctaccgaatacgttagaccaaccggtgttgttgtcttggtcggtttgccagctgacgcttacgtcaagtccgaagtcttctcccacgtcgttaagtccatctccatcaagggttcttacgtcggtaacagagctgacaccagagaagccaccgacttcttcaccagaggtttggtcaagtctccaatcaagatcatcggtctatctgaattgccagaagcttatgaactaatggaacaaggtaagatcttgggtagattcgtcgttgacacttacaaataatcggattaattaaagaatgtgtccctcattagatttcttttctttatttaactcccattattacaaaaaaaattagtgcaagggaagagtctctcacctcttaacttaaaatgaaaaagaacaaacgtattcgccataatcatatcatcctcagcctcctattttaacaaactcacacaacgattcgctctggctttatgaaccttgccaggcgtgtgtttttaagaagaagtttaaccgttagataagaaaggatgaaaatttgacgatacgttcttattccatgccaccccccccccccactgttacgtatgtttattgttagagcttatgacctatcgatgactattgttattatcttatacagatgaaaaatctcttttatttgaattgatttcaaacaacgtattttttatatatcatagtagtcattgacccccctctctttcttatcaatgaagtaaataatattcaatcaatattccaatttttaaactaactttaataccagacttatctttgaattgactggtattgtcactactagcattaatttatgtgtattttttaagatatatatatattattctattgttacaaagttttacagatatttttattcttcttgtgcactaattgcaccggcaacgtctttattgaaccgttcaaatgatgccatagtatccttatcgttaacgaacctcttactgcgagtctccagacttagcactgtctccgtaccattcatgcatctcatctcaacggtaaatttactcttgggtcgatttctcttaataccaccgaaattgcaatcgtacgtcacgtactctttatctcccttacgttccatcttttttaactcacaatctacaccattcttaccgaattgcgtcatgagtaagatgtgaatgttatcaaacggtatacttgaggtccggtattcatatactgtccgctttggtttcgaggttttaatccgttgtaatagtttactgaaccaattaacgggggaggaagacttcatactggtaattggtttcacttcatcctctttgatctttggtaatttgtttatgtagttggatttccttttgctgccaacgttatttgtcgtcgtactgttggcatttagcgtcggttgtcttctttctgcggcaacgggtttgaagacctgttcggattcagaacttccgtcatcaaatagtaaagtcacccttctagtctgaccttgaccatggtttccatcatcgttcttttgttcttctgttgataggtccaggttatcgccattgatagaagatacaagaacagtggaatttcttttaacggtagtgccgtttgtgtcttcattggtttcattttcgactggacgtgtatctaatgcacttcctaggagtcccagtccattatcgtcatattcagcacggctttcatcaccgtcgagatctttgaacatcgagatcatagaaccggtgatggttaaatctctgtcaccattcgaaaatcgcttttgtttgatatctttgatgggactcaatttgaacttagatataatttgttctgtcgtttcccttggtaaattatccagcttatccatttgattgatgtataaactgactcttacatccgttgctggtgtcaggacatgacttgtatcgattgaatcgatagaagcagcttttttcttcaagttaagctgtgactgatcgatcattgactcagaagtagtaacagattcattagcatcgtctggagcgtcttcgaaaatatcgatgtcaccggctgttgtgaccgctggtgcagtattgacgttataatcgtcataattggaactggtctcaaaccggttcgaatcattttcaatcatcaaagtttgattttccgagagtttttcatgatcagtattaacaggattagatgcctgagtaactggtactttatcctcatcgatattcatgataaactgagagagatctttgaatgtcattgacgaattgatcaacgacgatggcatgcgtaagagatcaggcttaatgtcagtcataggtgtactggtagttaacacggtttccggtgctgtcaacttacttggattagtcttctgcctttgcaattgattttcaccttccgaagaacctttcccaccaaacaaagcctgcgcctctccgcttacagtccaatccccactatctcttagctttctaatggtagatcttgacttgattctctgtggaacactgaccttccttagaaggttctcaagtgatggcttaggtttgttacgtttggggtccaaagatgagacatacatggacttggattggaatgtattggtcatatccttcaacggagtcatagaaacaggaacagtcgctattgtgttatcagccgtcttccgtttcattgatgtcacactttgtctattttctgtctgtggctgattgttcagttttggttgtgccagtatattcttcgatggctgcgtaagtttttcattctgttgagctttcatgtgctgaccagattcaccgaggaaattatccatcgttgcaccatgcacagacgtacttctatcataatcgtccacaatagattcaagtttggatgaagtgtgctccgaggatgaaatagaaggtaaaggcggaggtggatattcatgttgcaactcgtcatgaagcaattcgttcaagtttattgaacgtttagaaatagattgcaaagagtacaacgatctctttgaagctgagttttgtaacgttcttttctttggagtggtaggagtcaatgacttcttagagctggattttgatatcgattgtgaggaagattttgcgccaaagtttggttggaaaagttttgaggaggaggaagaagcaatgaatccctgttttgtcttctttggagattttgaacttccatttttcaaggaacttatcgagaaatgtgatttctggtggatctttggagcctgtagggtactagattcagaactatcagatgatatttgttgtccaaaggccgatattgttggagccatcgatgctggcagtacagttccgttacttgattgttgttgttttttcgctgtatttgttacactattcacatcagatgaaatattcaatggactgaccgaggaagcggacgatgttttcaacgtaggaacaggtattaaatccttttgcatcgatttctgttgtttctcctgataattccatagtaaagaataaaacattttctcttcagtgaatcctggtttcataagtcttgtcaccaaatgtttccttgcagcaccgtgccataggatctgtaggttggataagattgtctcatcgatgtccctttccgacgaaaagctcacaatatttggagtacgattcaacagattcaaatccgaattagacttactgcgagatttctgatcatatttcgtcagcaactcatgctgtaagatttggtcaatagtaattcttctatttggatctaccaccaggattctagaaattaaatctttagcctctaccgataaccattggggcatctgatattttcctgactgtactttcaacaacaatttcttgacgttatcgtcgttaaagggtaaatgtccagtcaacagggcgaacaagatgataccacaggaccaaacatcacttggggatccatgatatttccgacccagaacgatttcaggagaagcataatgtggtgagccacacgaggtctccagcagtttatccgaagtctctagggcagccatcccaaagtctgcaatcttgatagatctctttttcttatccaaaagcaaattctctggtttcaaatcacgatgacaaatattgaacccatggcagtatgctacagcttgtactatctgtttgaaataatggatagcctcactttccggcaacttccccttcgagaccaaatagtcgaacaattcaccaccttcaacatattccaataccaaatataactcagatttgttttcccatacctcgtagagacccatcacattggggtgcgagataagcttcataatgataatctcacgttcgatcccatatggcagctgtttgatctggttcgacttaacgaattttttgggaactatcttaatcgctgacagtttccccgtttccatattctttgctagacgaactcgacccgatgaccctttccccaaagtcttacccaatttccagggacctaccgtatcgcggtttctcctcttcgaagtcttggtattattaacattagcattcgacgatgcagtcgaaatctgtgaaagacgcttagtagcgtctgttactgactgaacaaccctattcaaatgttcattatttgcacgatatgggacctggccgtgactagaattatccttcattgccacaacggcagcttgaacagcacacgacatctagcacaaacaaagcaagcgagtgaaattgagaaagcaaaagagcagaagagagcgtgtgtgagtgtttaagtatgataagcgaatgtaatgattggaaaataaacacactctgtgatcaaatcaatgattcttcttcttcttattattattagtattcttcttcttccttataattcaaatggtagacctagccttgtaatttgcagttccagcagagcgacaaatcagcgttactgatgatgttaacgttgcttggtgtcttctctcttggatgttgtttggtttcaaattctgattcaaacattgttatgtgtgcatatatttcatgaaagggctttatttggtaaatagttgaagtcattctgcacgactagtaaatactagcaagacgcgagtttgagctttgttcgcgaagacgaagacgcgaaaacgcgaaaattggcagaagcagtaaagtcgagaacatggcaagttcaacttgctgtgatagatttgaaccagggctttcggcgctggttcaataattgtgttggttgctgccagtgtgctggcacgggcacgggcatcagcacttttggtttatctgaatgaaatataggcacaaccacgtgacctttgaatttacacggccgaaaacaactagatattgtcacgtgacctttatcaattctgttgcctatacgaactatgacttaaacttatccatgatatcttatagcaaccatctcgcaccactctcccctgagaatagtaactaattgatcttcaacaacgcttaataacgttactatccctcgatattcacactccgctcccaattcaagtcatatttcgctcgctgtacaggactctgaattacttttaacgtctatcgatcacagtttcttcttctcccctatattaaagataaagacactgataacataacagcgctcaaagagacaaacaccatccgaaaagtgcaacccaatgacagaacacatcgaaataagcaaagaaactatcaacgctctaagcgacgtcttgaaacaactagccgtcattgaacctaggtcaagagacgttaacaaccaaaatgacaaggttaccaagaagtcgactagtaagcaaagccaattctcgaacaaagcgacgttcagagagtactcgcaagagtacatagatttcacatatgaaaaccctaccatttaccacgtcgtcaagtattttgccaagaaattggaagagaatggcttcggttatctcagtgaaaagagttcttggtccaacgttgaaccgggccattactatacgaccagaaatggtacaaacctctgtgcctttgcggtgggacccgaatggaaacctgagttaggtgttggtatcattggtgcccatattgacgccttaactgcgaagttgaaaccttcttctaagaaacctgatgtggaaggattcgaattgttaggtgtagctccatacggtggtactttaaatgaactgtggttagacagagaccttgggatcggtggtcgtgtcctaattaaggaccctgatactggtaagatcagttcgcatttgtgcaactcggctccacaccctatcgctaggattccatctttggcaccacatttcggtgcaccaagtgttggtccattcgataaggaggaccaaactgtgcccgtgattggctacgtcggtaatggagactacgatgatgatgatgaggaccacgacgtcgaggatgaaaagaagagcccgttgtacggcaaacatagtatccatttattgagatacattgccaagttactatccgttaaagtgtctgccattacgcaatttgacttggacttattcgatgtgcaaaagggtactttcggcggtcttaaagacgaattcatctttgttcctcgtattgacgacagaatctgctcgttcagtgccatcaatgggttgatagagcacaagaagactggccataaaaaggatggatttaacgtcgcagtgctttatgacgacgaagaagttggatcgttgacaagacaaggtgctaaaggtggattgttagaatcagtggtcgaaagaatcgttgctagcaggggaaacgacgtctctgagacgcgtacggcattcgccaactctatcatcatctctgcagacgtcacacacatgttaaacccaaacttcaactcagtatatttagagaaccataaaccaaagccaaacgttgggatcacccttgcattggattccaacgctcatatggctacagacgttgttgggaccgcattggtggaagaattgggtagattgaacggggacaagatccaatacttccaaatcaagaacaattccagatctggaggcaccattggtccttctttagcatcccaaacaggtgctagaaccattgatatgggtattgctcaatggtcaatgcatagcattagagctacaactggtagtaaagatatcggcttggcagttaaattctttaacggattctacaacgactggaaccaagtctaccaatcctttggtgatttgtgattaaaatcataactcacctccatttctataaacccctactacggttactaatcttactgaaatatgatcgtcctaatgaattgggcccacatgtctgaatttgaactatgaatcttatacgcaaagacatgcaattcatacctcatcatagtactacataacaaaactataccagttacaccagatacaggatggccctacgaattacaacctccatcaggacaactcaaacctctggtcctttggtcttctctgtttcaagcctttatggatcacactgtatttacatttctaaaactggtaattatagtaacaaaaaaatttttgtgttatataaataaagaacacatatggtataaatataaactggacttattcactcagggttttatgccaagcgttcgaaaggaaagaagctaacaaaggatccagtaactctaaagtgttccagcggtagcattagaaaagacgctgaggcaagatagtttaggaacgcgatagaatgtgtggtatctttggttattgtaattttttagttgagaaatctcgtggcgagatcatcgatactttagtggaaggtttgcagagattagagtacagagggtatgactctactggtattgctattgatggtgacagagaagacgaaactgttatttacaagcaaatcggtaaagtttctgctttgaagaaagagatcgaagctcataagccaaacagggacgcgcattttgtcactcattgtggtattgctcataccagatgggctacacacggtgagccaaaacaggtgaattgtcatcctcacagatctgatccaagcggtacttttgttgtggttcacaacggtatcatcaccaattttagagatttgagacagcttttgacgaataaagggtacaagtttgaatccgataccgatactgaatgtattgccaagttattcaagcatatctacgacacaaatttgaagaacggtcatgatccagatttccatgagttaacgatgcaagttttgcaagagttggaaggttcttacggtcttttgtgtaagtctactcattatccaaatgaaatcatcgccacaagaaagggttccccattgttgatcggtgttaaatctgaaaagaaattgaaggttgatttcgtcgacgttgaattcccagattctgagcagttaccagatttgccagttaacaacgaatgtaacttgttgaacgatgctgatagaagtttgcttccattggccggtgacgaaagtaccttgcgtagatctcaatcaagagctttcttatcagaagacggttctccatctccaatcgaatttttcctttccagtgatgctgcctccattgtaaaacacaccaagaaggtcttgttcttggaagacgatgatattgctcacatctacgacggtgaattgcacatccatagagctaacaaaaaattgacagaatctgccaccagatccattcaaacccttgagatggaattggctcaaattatgaagggtccataccaacatttcatgcaaaaggaaatttatgaacaaccagaatctactttgaacaccatgagaggtagaatagattttgaacacaatctggtcaacttgggtggtctaaagtctagattgtctgccatcaggaaagctcgtagattaataatgatcgcctgtggtacttcttatcactcttgtttagctacaagagccattttcgaagagctaacggagattccagtatcagtggaattagcgtcagatttcttggatagaaaatgcccaatctttagagacgatgtttgtatttttgtttcccaatccggtgaaactgctgacaccatgttgtccttgaattactgtttggaaagaggtgcattgaccttgggtatcgtgaacagtgttggttcttccatttctagaagtactcactgcggtgtccacatcaatgctggtccagaaatcggtgttgcatcaacaaaagcttatacatcacaatatattgcattagtaatggtggctctttctctatcagacgatagagtctccaagatcgaaagaagaaacgagatcatccaaggtttgaaattgattccaggtcaaatcaaagaagtcttgaacgtggaaccaaggatcaaagaactttgtgctaaagaattgaaggatcagaaatctttacttctattaggtagaggttaccaattcgcaagtgccttggaaggtgcattgaagatcaaagaaatctcttacatgcattcagaaggtgtgcttgctggtgaattgaaacacggtgttctagcattagtcgacgaagatttaccaatcatcgctttcggtaccagagattccctattcccaaaggtcctttcctcaatcgaacaagtgatagccagaaagggtcatccaatcattatctgcaacgaaaacgatgaagtttggcaaaacaaggccaaggccaacaatttgattactttggaagttccacaaactgtcgactgtctacaaggtctattgaacattatcccattacaattgacctcatattggttggcagtcaacaacggtatcgacgtcgatttcccaagaaacttggctaaatccgtgactgtcgagtaagaaaggctctatctttttctcattttgcgtacagtttatctaatttttctagtttgtccgatacattctccacatatataattaacaaacccgtcagatcaattccgttcccctcctacctactattaacattgtaacaccaatggtaaccctcttgtctcttgttttcatacctttaggtccgatttggtcttatttcggtttcttttcgaatgattgataccttgagataaaaacagaaaaaaaaaaagggcaaaacattcaaatcgaactttaagtgccgaacatcaacagaaataacgaaagcaaaggcacgtaaaataccattactgtttgttagagggcactagaacaggtgtaattcgtgtatcagtcagctgaaagtatatattaagtggaattggttcaagagagggattaaagaagctgctgttgcttttataaaaaaaatgtttcgttctagaaagtcaagagaatcgcgttctattgatcctggtgctttggttgctgcaaacaccattgggaaggcactggtaccttctaaggattcgtttgggggccaggttgtagataagagtaagattcccaggtataacagtataagtggccgttcctactcgatggtaaacagtcccaaaccaagttctcgtcggaactctgtgagacatgctagtgatactggagatcgttcttccaggtatggctcgatgcgttccgtacagagtggtaacagggttgctcaaagcgatgcagacaaggttttccatgagtttggtggtaatgaggccaaatatgtgctaggacccagtggtctggtacgtgttgataatgacaataatgagcctaaaatggtatctagatacattcctagcagccatgggttggtcaaagtcgaagttcctttggaacagtacgaggctgagaggagaaacagtcttagaaggtcgacttctttacgtggtgggatgactgtaagaaactcactttctaataaaaggagtcatgcctctttaagagcaaactcaattggacatagaacaccttctggaaccccattgaaaaaacttacagaagttcctaccgttgaagaaaaaaaagcggatattactcattataggtcttcgccatcaccggtgcctagaatcacaaagactgtctatgcaactacagccaaagaaacatcagctccagtcgaagaattcaaacccccatccttcggtaacggtactgcattaccacagactcctgaaagagctatcactaaagatttgatagactcagcgacagaagaagaacagccaaaaattcatactgatctaagcgttaccaaagaagctgttgaacaaaagatcgaccttgattcaaagcaagtggtagaagaagaacacgttattcttacacatcagaaggaagttacttctttgccagatgaaacgattaatgccgagaaggaaactgacaaggaatctctcaaaaaagcagagcataacacatctaaagtagatattccggattcaaaagaaaaggctcttcctggcaacgatggtgtccaggaaactatagttgaaaaagtggttgatgaagaggaacatcaaattgaagttcaagatcctatcgttgctgaacgtcaatcagaatctcaaccggagtcccaaccggagtcccaaccggagacaggcaaaagcaccctcgctcagtatatcaggtccgctaatccagaactccagagagttaatgaggaggatgctcttgttacccctaagattccattagaaaagactccttcacctataaaatccgcaatgaagaaaacaaaccacaacagccaacaacttcaacaacaatctcaagcttcaagcgcatatctgtctttaacaacaaaggaaaacactaggttaaatgcgcaactttctcacgaaagtttgagagaaaccgccagcaaacaacaagcacaaaatcaataccgaagacagcaacagcaaaaccagcagcctctagctcctaagagaaattctcaaagaccgcaatcaatgatggctcaaagagttaatggtgatagacgttctttcatgcagaataattccggtgttgcttcccctcgcgatgctagacctagaagtgtcgtagggaagccgtccaacaatgccaaatcgcaacaaaatagtggactttacccaagggaacctcctcaaaagcgttcaagcttcgaaaagcaaagaccgatgtccaccaaccttggatttaaaaacttatcgttgagagaggatccgcaactcactgaccagtacgagcagcctcaagccccattccaaccacatccacaacaaagacaatctagaaactcaacccctgttaaaagtggagtaacgtacaatggtgtacagtatgtctccggatcagtaccactgcctgcttccaataccaacaataacaaaccaaaagcgtcgtcaattgctcatggattcaaatcaagatttgccgactctgattcggacgaagaatccgcaaacctacagttcagcaaccaagggagtcgatctactcaagtttcaagcgaatatgaaccggcacctcctccacccgcgccatacaatcctcatgctactttgagacctcagccagagcctcaaataaacgcaactcacactactgagaagaaaaagaagaacaacttcagcagtaaactaaagaagcttttcggtaacaagaaacactgaaaagtagcgactaatataacacgaaacacatgtaatgggcatttataatcccttttgtattctagttacccaaaaattgtgattaagaacactaaaaactatctaatgtacaattcaaaccgaagctttgtagtaataaataaataaataaataaagtgaaattaattaaagtcaatttgatgatattgaaacatcttgatgtgattattgaaccacttggcgcaaagaatcgcataaataatcaatattaccgtcgttaactccagataacgacatcctgccgtcttcagttaaataaataccgtacctctcctgcagaatttgaacctgatatgggtttaaccctgtgtaataaaacatcccatgttgtgttttaaaatcaacaagattgggccaattcaatctctcatgcatttgaattctaacgttccatagtctatcagacatattcttaacgtctacgaaccattgctgcttcaattttggattgcttagcaccaagttcgctacacgagacccatatcccggtggagaagagtatatacctcttacaatcttctttagttgagagtcgatggttgatttgagatccaagggatttggtgggacaacgacacttaacgaacctacacgttcaccgtataagcccatgttcttagcaaacgattggcacacaaatagaccgttgggccattcgtattctagacacattcttaatagataagcatcctgtataaggttccctgattccattccttggtacgccatgtctattatgggagttattcctaaatcatggatcactggcaatatctgttgccattgttccaacgtagggtccactcctgttggattatgacagcaagcgtgtaacactatagaggggggccagtcggggtccctagaactacaactctccttgagttccttgagccatttatcgatactcaatttcccatcctcgtagtacgtataatatttgatctgattgaatccgttccattggaaaacgttcgaatgattagcccaagatggatttggtatccatacggttttcgacacaaacgttgccaagagttttgaagctacagctaatgcaccggtaccactcaaagtttgcacaaacgtgattctgttgttctccaataattcactcccgtcacttgactctcgatacaagaaatttaacacattgttttggtaatcctgcgacccagtgataggcaaatacgataaatcattattcagatcgagactcgtctcaagtaatgattgggcagaagctacactagggaaggtggtcacacggccccggttgtccttatagatcccaacggtcagatttatcttgtttggatgtctgtcaacgttaaacttctctgttaaacctagaatcttatcagcaggagccctagttactcttgacaaggccgacagccctcttcgcgttggtattctcattcaaattggggattagaccttaatttcttgttaatagtactattgcaaatataaaaagtgcgttaattcttcaacactccactaattccctgttaataatacaaaaataatattcagaatggttccataaaacaacaattgatgtgccgactcttatagtcctaatgtatgctggattttgaaaggttattcctttgttcaattattggagaagttaacgatctataaattatccgatgagatgagagttgtcattaagtttacttttctttttgatttatggaaaaagtgaaaaatttcggataatttaatgacgaattggcttggaatagtgtctcaaagggccaataggtaccatcttctatcatttttgcggtacaaatcattcagaatcaaatactgagtggtttaagagtgtttaaacggggaaaattggtttagtttggaggatttaagatcaaataaaacccgagaattttttttttttttaaggtacaattgatgaaggtgcttttgattgacatcaatgctcgagtgataaaccattgggccaagggtttagggaatctacttaaatctggcgaggtttccatacataatgggtcgttagagtcgttcgaaccgaatgggctgttaaaatcaatagtgtcaccgggaaattcttttgggtttcttggtggtggatttgacctagcgatacaggaatacttcggtggctcgttgtttgagcgttatgttagatataagttgatgcattcgtatgttcctgtgacgaattgcactgtgattcccttgaatcagtttagtagagaccaattccagtaccttttacatataccaactgttgtgacaccggtggttccagattacgaccgtcgagatccagtccattccgggtatagaatcgtatttgacgttacgtggaatgcgttacacttccctccaagtgaaacagaacaactggttttaccgggactatgtacaggttacgcaggcgtaccgatccctatcgcatgtaaagccatgtgcttcgccattagattgttctacctgaagagcatactgtcgcaagaccttatcaacaccatgatcatgtgcttcatgggataccagtacgagccatttattagtgaggattgtctcatggaatgccagaaagtaggtatcgactgggatacaatgcaccgtttcaatcctcatgaagatcctttggattcgatcttaccatctggttactgacgcaagatacatgaaatatacctgtgaataagaatcatttcgttaaaattacacaacttgtttatgtctataaagtggaatttgactctttcaacttgaatcggatgagtcgtctttcgtttctgtaacttctttatcgcaggaaatgaatagcttgaatgcgatgatcaatgcgagtatgctaactgcaaatgtaggaatgtaggagatcaaaaaggattcgttgtagatttctaacaaatcacgcaatatctttccactaaaatgatttcttaggaaactagtatcgtgaattagtgactcgtactctttatccatgttaatcggatgcaaatattggtataacttagtggttgccgaagattcaaaaatagtgagaacagaactggctccaagaacagtaccaatagatctccataagtagaaacagccggtgatagtggcctgttgagatttgggaatagtgaatacaatactaaccaacgttgctaccaagagtgatgcgtaaccccaactgttcaagatcattgctataacgtaaaggactctccacctgaactgatttgaagtgaaccagtaattggtaccactagtgtctaaagcgctgacatgggatgtagggttcggttccaggtgtgatatggtagtataacccaatgaaagggaaatgaaatgtagacagacagcaatggtaatcaacagatatgaacaagtagctagacctaggctcgtatttctcaagatccacccagtagctagacttgcaagggcacttgatatgctggaaaacaataggaacccaccggtgctggtaggagaaatgttttggactaattgaaggtatacgggattcctaaacacatcaccgaacgcaataaaggaggaaaagaccgttagtaacgaggttattccgaacgttcctgaaagtagatcggtagggatgatacgttcaggggcccagtataattcgttcataataaataatacaagtgaaagcagtgtcagtgttgctaacaatggtttattaaggtccgtagaacatagacataagaaccctgatatcgtaccaatcaaagagatcgagcctccaagatcaatccgttttatgttttcccatctatagcgttcatgtcttggtggaacgtgcaacaacttgatattcacgtttctgtatccaaggaacatacaagtcatgatcaatggaacctgtccagcaaatataaccttccacccaaaagaatccatgagccaaccaccaatagggccacctaacattgaccctgtaccaaatacaacattcgcatatccctggtacacgcctctctcctttggggtacaaatatcgcttacactgatgctactgagtgcactgatacctcctgctcccataccgcatactgctctggcaatggaaaattcgaccaaattacgagaaagagctgtgaacagacatccgacaaggaagaacgaatgagctaccattaatgccgtttttctacctgctaaatccgacagcttaccatacaacggctggaaagcagtattagtcaataagaaacttgtcacaatccattgcttcttgtcagattcttcaaattcttcagcaactttgttcataatattagcaacaatggtggagtctaacgatcccaagaaactacccatccatagtgaataaagaatcggtcctttaggcaatgctaagttatgcctatgatacatttcttcaagatcatcctcatcggccgatgatgacgttatacggttgcttaataaccgagtggtttcatcagttgaatggttcatctctgctcgcctgtgtataacgtgagttacttgtcattagagattctccggtataaccacagcaatactaaccatccatccaaatggtacgttgcaggttatctttgttgatcttcttcctcatcaaccttatatactttcaatgtgtcgctttatctatctcggatttgtttttgccaaactcggaaagatcacaccgagaggcatataggcatgcataatgttaaacaatcaataatcagtacgctctagactgattaatggccaagacaacaagcacatcaaacgtaagtgaagtaaattgtgtcaacgtagacctcttttgttattattaagaatgacttacttaaaaccacctatttacatgcttgatatatacagtatagtctgatgataactactggtgcttgggattacgaaatgaaattgcagaaacagagtagttagagctaataatgttattgtttttaaaagacgttgggatcatcttgttcattgctctttttgtctgaatccttcttgtccgaatccttcttatcattatcctcctgttcatctttcttttcagatgctctgttcttcagttcgttagctgcttcttgatctttgatctttttggtttcacgttcattcaagtatttgtcgaatgcgtcgttacgttctgggaattgacgtttacctaagagtgcaatcatatcttctcttgttagaacttcctttttcagtagaagttgagcaatcttttcaacgtcttcagccttttctttgagtaacttggcgcaacgatcgtggcattcttgaacgatacggtacacttcagagtccacaatggatcctgtttcttcggagaacggtttggttagatcgttttcacttttcttggcaaagttgatccacccgatcttatcgctcatacctaactcagttaccattgcagtagccatacgagtaactttcttgaaatcatcgctagcgccagaggtcacgcttgggaagtgcagttcctctgatacacggccacctagtgccatggtcattctgtcctttagttgttgttctgaaagtaggtatacatcacctggtaagtattgtgcgtaacctagagcaccttgacccctaggaatgatactgactttgagtaatgggtcagcaaactctagataccaaccacagacggcatgaccagcttcatgatatgcgacaaccttcttttcttgtggagacaatagttttgattttctttcgacaccaccgatgaccctttcaatggcctgttcgaaatgttccaatctaacagcatcacaatcgtttctggcagcaatcaatgcagcttcgttacaaacattagcaatgtcagcaccggagaaacctggtgtcataacagccaatctgttttgtagatctgtcatatcaccagccaatgtaattttcttcaagtgaactttgaaaatttcttgacggccttgtaactctggtctatcaatgttgatatgtctatcaaatctaccaggtctcatcaaagcctgatctagaacatctggcctattggtacctgcaaggacaacaacatgatctgcagtagtaaatccgtccatctcaaccaaaagttggttcaaagtgttttctctttcgtcattggcaccagagaagttacccttttgtcttgccttaccgatagcgtcgatttcatcaacaaagataatagctggagcattttctctagcggtcttgaacaaatcacggactctggacgcaccaacaccgacaaacatttctacgaattcggaaccagacacagaatagaatggaacaccagcttcaccagcagtagcctttgctagcaaagtcttaccagtaccgggaggaccagataggattgcacctcttggaatcttggcacccattctttcgtatctggatggttctttcaagaaactaacgaattccatgatttcttccttggcttcatcgcaaccagcaacatccttgaaattgacctttacgtcggtatctttattaaactttctggcctttgatttacgcacgttgaataaaccacctgggccaccaccggcagcggatgcaccctttgtagtaatccaaatcaaacctgcaatcaatagtgcagttggtaatatttggaaagctaatttgacccaattcccctctctagtgtaaagaacaggaattctaaagtcttccgcgatattcaattcatcttgtgctttcttcaatttatgttcaaatgattccacggatccgatcgtaaagaaataaaaatcgtggcccatatgttcaggttgatttttcccgttatcgttcaagataaccttgactagattattattgataacaattaatttggacacgtaccctttcaccaacaactggttacggaattcttgccatgtaagttctctttgttcctccatgctgttcaatctgtgtaggataaatgctaatatcgtcaatgtcaaaccaactttgaataaattgatgttaacagtcatcatattcgaatcatttggtgtgaaatccgtatttccgttggaactcttcttagactcattcttgggatcattcttgggatcatgcttcttcgccgattcttcaaattctctcttctcgcgctctagatggaaaggatcattcgctttatcttgggcatcttctttttcctgctgcctcttcacagcaagctccaacctctgtaattgctcttcaatcttcttcttacgctcttccatatcgagtttctgatctttgttcaaatcatcgataaactttctaacttctttcctgactttatcaacgtcttcatccgtaggctccttttcaaaccgattctgcatcaagttgagcttaccggaatggaacgtacggcatacgtcgtttcgtaacaatatcagcgaacgcccctttggaactttgtacaacgccctactggccacagactttacgccaagcctagataccggccttattaaatggaacattgcaagtcacttcaatgtaataaaaccaccacgtcgctgctacggttagccgagtctgattgctataccgtttacctaacaggacttttcgaatttaaaaccagtggaaaatctttgttaacaccgaaacaaaccgagacaaaaacagccgtttcaacaaacacctggctattttacactactatagggtcttaaattcacaatgcaaccactgtagattgcaaatgtaactgctaacgctccttttatcggtggcaaatggccttgtctgttcaccttatggggttgttctggttgaaaagcccaaattcatttttggtagagcaaggacatatcgttacccggccacttagtataatacactcttattacgtatgttgagatatacacgtatacatgggaggtcagttcagctatgttataggcttgtttcgaatctcttttgttcttctatagcagcgactatatcttcgtccaagatgtcttcgtacatcgatgtagggacgtcagaaagaccggtgcaaggtcttgctaggtcaagagctttgattcttgtttcgtacataacttggcttgtgtttcctttcactttcttcactgatatcactctcgtcgattgtgtggattgtggtatatgtaagacgttcgtgtacgtatctcttagtccgaggttttcgatgagaagaatgcgttctctatcgtagaaaagatcactgttgaatctactgcatgcagcagcatgatgatagagccagttcgtagatgagatattgcttgttgccgggatgttgtgatttctcttgtcaaagaattctactgcatttttggatgggttgacggataattgttgcggaatgtctattccaagggtatttcttccagtgacacttgtgtgtgatgtttctcttgctggggtaccctctttcaccttcccggatgcacgaagcttaccggcgtaataatcatccgtgatgtttttaccatctacaacaaccttggctccgaattctcggaacacactccttgcagtaactagcgcaatgattctgtttctgtacgaatagggcaatacaccatttttgatgagatcgtctctctctgattgcgagataatcaatttgtataggtttggatggtactggaagaacaagtatgagtctctgaacccaacggcacgggctggctcagtagaaagcatgtatttaacttcacctctggaaggtaccgtgaaagttctgactacaaattgtcttccctctagaagatcaccattcttggtgatcttggtttcaccctctggatcctcaggtaatgaatactcgtcattcacaattgggtatggagacccgttttcgtccactgggtacggtagtttctgtcttaagggatcgttcaaatcttcttctcttttcctctttgaaggccttcctcttgtcgctagtaccactggaacaggtgtgctcgaagcggccttgcgcttggaacgagatggtttaccctcgttttcgatatcagcatctgggtcatcatcgtaatcatcatcattggctggtccagggtactcttgatccttttcatcatcttcaatgtctaactcgtctgtatcgattttatagctggttgctttgttagctgagcgagaaaccctcgagctcttcctgcctcttcctgctgctgccatatctgatataggagaaactcaagcttcttgattggtgattccaaatacagaattactaaggaatgttatgcgtatatccgctttcaaccgagctttgttgatcttgtttgtttatatataagctttgagaggcaggaatctgttcaatgttcaagagaaacatcaaaacgtatgagatgataaagaagaaagaacaacttcaacggctttactagaagctctagatatttctgggggggggggccttgatgcaacatctgatcctcctattgttattcattgtcttatatttcgtacgttaactaactgttaaatacttttatgtgttactggtaaaaaatgtgtctcattcaaaactcgacggtccacctcttgatacaggcgtccacaccggcgctgacgatagtggaatcgttttcccatagtacactggacacaccgtccttttgtgcgtttaatctttttatcactttcataggtttgttaacagagtagatgaagatgttggtgtccagagagccagtgacaacataatcttcctccaaatcatcatcatttgcagaaggtctccagtcaatggatgtaattctgcttgtgtggaatgaccatctcgaggtcttgacgtccttcgtgtcaagatcatataggataatcttaccggacacgtcaccggcagccaagtacttttgtgatggagagaaggaaagagcagatggagtggcacgtaatggagtggccaacgtgaatgcatctgataggtcagaaattttgaatagctgcacggagttggtttgttcgtatgccactgccacgaaagtagttcccaatgcgagggccccgacaggtttatctagagttatcgatttcgataatagcccactcttgttatcgatgatcaacaattcgttagtgtttgtagcaacagccaaagtgttatgagagaaaaccgcacatttaggttgctctgagaattggtacttcgtttcagcaagcgctttttcaccatcgatgaaattcttcaacgtttcgtcccaagaaacactcgatacctcgttatcagagttatcgatggccaatacgagattaccatgaatatcatggctaatagcattgacttcgtcaccttctgaattccaggtaacaactctaccatcgtatgacccagacactaatgggtttaccgccaaagaagtaatccccttgttgtgaccatgaatgaatttgatggtatgatcatttagagacaaaatgctcaaggtcccatcaagcgtcaatgttacgatggagttatccttagtgacaacaacaccgacaatttgattcgaaacatctgcacctaatttccaagactgttggaatggatcatccaacgacacatcccacaaccttgcagtgcaatcagcacccacggtaacaactctagaagactcttcaccatcgtctaaccatgcgacagcaaacaaaccaccgccaattggagccttttcagactcaatgtatttgataaattcaccagtcttaccatcaaagcaacatatcttacgatcgctaccgacagacacagcatatttccctgcacctggagagaacttgacgtctctaacgaatttaccttggccgtgatgcgttctatcactgcttgcaaacttgaaaggtggaccctggtaaaacacaacagaaccatcatcactgacactgaaagctctcattggtctgctttgcttgaaatgaactgcattgactctttgagagtgacccgagacttcacctaacgagttgcccgagtcccaagagacaaacgcaccaaacctatcacgaccttcaccaacaacagccaatcttttaccctcaaaatcccaggatatatcagcgacaggaccagcgagcacatgtagttccgacttaacgttgtactcaatttctccagacttatcgtcctgattccaagaccaaacgataactctaccggaatcatctcctgaagcaacatattgagacccctggataggagaaaattttacaacagtgacattactggtaccatggccattgaattgaacgacatgttcaccatctaaagatctaatgatggcagatctaccgctaccataagctaaactgtcagtctttggatcatatgataaatgtgtcgtaaagtttctctttgtagaagggagaggtgcaaaaacctttgctaaattaatcgaaaccatattatcgcgagatactagatcaattgacttttggaacactctgtaaacgcaccagaaagacctcttcctgactcaaacgtgtcctgttctcatggtttagtttcttgataaactggtgagtataaataaattccatacatatggaatgtaaatagacgaaataataactactgggatgcagaaatacaaagaaaagatatcctaaataccagttagtataatgaaagtggtattgctgaatacctgggaatcaagaaaatctgggaaaccaggttaaaagcagataaagggccttaaaggccctttatctgcttgtaaagtacagtgaacggttattcttctctgaaaaatcacaatcaacgagattcttcgagtcttcaaagaaaagaaaccagattttggaaaaaaaaaatgattgaagccttagctcatcgcatggttgataaaatagatttccctgtaatttgcgagttatatcagtcggtttggtatcgtcagactactgttaagtgatagaggtgattcaggcgatcagattggtagaaatattgtgaagaaaatgtcgtctgtgagacctagagtgacgccggtaaaggctcctgtgttaccaaagcagaccaccccagagcagaggtactggaggtcttattcatctactcagcttgttaaagagcacaatgcagtgactcatattgccttcaatccccagcatccacatgattttgcagttacctcttctactagggtacaggtcttctcgtcaaggacaagacaagtgatcaagacgttttctaggtttaaagatgtggtgcattcggccactttccgtcaagacggtaaacttttagtagcaggtgacgctactgggttagtgtccgtttatgatagttataatccacgtactttgttgctttctatacaagcttcgtcgcatcctacgcatgtgacgaagtttcacgatcaggataacaagactttggtgacggcaaacgacgatagagtagtgagactatgggatgtttctcatgcttatgaacccactttacagttaactggagcatctgattatgttagatcagtctgctttgtgccaaatgctccacatatggtcgctacagggtcgtacgatggagtagttagattgtacgatattagaacgaaatcagataaaccacagacaactttggatcacggtcttcctgtggaagatatcacagccatatctcctactcagcttgcatcgtgtggtggtaacgggttcaaagtatgggacttgactagcgatagagccctttgtgaacgtcaaaatttcgcaaagacggtcacctgtttgaattacacaaatatgggagaagaatcaccaatgagttccgtactagttgcatcctcgcttgatggtcatgttaagatcttttccccgttggagaacttccaattcaagtttggctggaagtttagcaacgctgtgctaagttgtgcagtctcaccaggcgatgcgcaaggtaataaacatttcgttgcaggtttatcctcaggaattctagccatcaagacgaagaagaagtccaaaaagattaacctcgctgatgtctctgatttggaggatttaccattacaacagcaagagaagtctgcgaaatccaacaatttccagagaatgatgagagggtccgaatacagaggtgatcaagagcatattatacacaacgataagccaaatcctcagcgtaagttgcgtcaattcgaaaggcatatcaaccaattcaaatggtctgacgcattagattctgcatttatccccggtatggctaaagaattaactttaacggtattacaagaactaaggaaaagaggtaaaatcaaggttgcattatacggtagagacgaaagttctctagaaccactactcaactggtgcttgaagggaatagaagatgttagaagtgcaccaattgttgcagactggattgcggttgtaattgaactctacggtagtgtactggagaagtccccagtacttgaagagatggtaatcactctaaagaaaagagtaagggaagagatccgcaaagcaaaagaagcacaaaagatagagggtatgctccaattgttaacaaactgataaaatcctttctacactgatctataacaaaaaggaatgcgtgtaaaagattatatttatttacatttatagtacatagactgcaacaactgtatcatcccgttcgttacgtctgtttctttgtttttaacgttctgactttgaagaaatcaccttcttcctctccatttactggctctgtttcttcctgcctttgttggaagattcaaacgcttgaagttgttgctaacaaggttgtatttactcttacgttgcttcttctttacgggtggattggattgttgttcagagtcagactcactttcttccacttctttacccagcattttattgtactcacgttccttcaactttgctagctgttcatgaacatttttgtctggaatgttggtcgacttctcgtttaatgctgctggtctcatcttcgcttttgttcttttctttatggttttaactttccgcacataattgctctcagtttcattgccgacagttccctcgtccccctcttcaattatatccatatgttcttcctgcatcagcttttccataagcgttctaatcgcagtgaattcgctgaaatcttctgggttagattcgaattcgtcttttataatggcatgttccttcgctaattgggacagtgtcttcaccggccttttaatcagcggcgatgggctgaagggagaacttttcaaatccagggttctaccaagcgtctttggtgtttctgacaactgcaatccaatatcgccgatccgcattggggagtttggtccatatttcggtcttgacacaacaatattcgcagatagatttggaacttgcttcattggagaagagttcggcgttattgagaagttcaattggcgccttaccaggtcatttgatcttactggcgagccaactatatcttcttgatccgactggtgagttttcatggcagacacttgcatctcaaatatactaactaatttcccattcatttgaggagtcggtccgaattcagcctttgtgttattcacatgcgacttcactggtgtttgctctacgttaacctccaccgatggtttaacagtagcatccttcttgagctgtgcatactgtttatactttctcttgacctctttatccttttttatatcatctttctcaggaagccttccatgctctttctcgaaagcacgctcccacagcttgatctcaatcttaagagcatccatactagcgcttgatatcacgagtaacaacggtgcatttactgtatctgtctcttttattccattcataaaggtcgttagaataaaggcaaagaacgaaattaaaacgcgtaaattattgaagtttcccatgaagaagaataaagagaaatgagctgcaaaagattcacgatcacaggtcaatcagggcacatgagatggaatgtttgataccaagctgttcctcagtttaccaatcgatatacggtatactgtttacttctttttgggcgacgttgtgcaaaatgtaagaccacctgctaaatcagatatctttaacgatgagcttattgcctatcctaatataagggagttcaatcaatctctggtggataagtactctaaacatattggtgtatatgactatataccaaatttcattcccaattggtgccgagacttcgatttgcttcgacatgacataatacttactgatcgactgcgggtttgtttacaatatgaggaacaatggtttagtgtccaatggatcgtagtgtcaggtgagcttgaaataggaatattcactacagatgagcagtttctacaggtgagttataccattaacgagtattgccatcttttgagtattgcacaacaagatttgaggttaggaattaacgtcagtgatatcaatgatgtcaatgaattatgcaaagagatacaacaccgctggctatttgatacagtttcatatattagtttcatcaattgctgggatttagatcatgagaacgtcgtttctatcattccatgcatggagtcgttcaataacttgcacatgcttcgcattgaatcgaagaacatgtttaataacctgattaatactcaaggagttcgagagaaccctggtaagacaatagtatacaatgtccgacaaaatatattcgaattagagctgtatacgttgagggatttggggtacaaatctgttgttgatttacaaaaatgggaacaacttcaatgtctttccttatcaggttgcgaattcatagacctcaataaccttattttaccacaacattgcaagatgttgatattaaaagaagtgaagtatatcatatggtgggacctgtctcatctgttgaaacgaatcaggcctcaatggattataaatggtcaggtgaaaaaacccacgaagaaagaagaagaagaggaatcagaatggtataacctttatttagaagtggtacaaacataccaacctctgaatttcatagaactgcacaacgccaagcgagttaaaggaaatctaatattacctgctcgtttagtaaccgaatctagaataaagatttctaatgggactaaggtagattctgttttactgatataagagaattgtgtccaatgtgtacgataaatatgtcaattcattagcgcgagagaaacagagaacaaatgtacatatagacttataaataagagcaatataatgaatatagatagggagagtaatttcgtgtcattcatttcatcaaacgagattggaggaccgtgaatactaataataataataataataataataataaaaaaaatcggtgggtaataaaggtaaattattgtgtcgttaaaacattattgtcattggaatcgttggaaggggtcattaaaagggggtgcttgacgtactcattattcgagaataataacggtgttaaatgaaggaaaaacatggttagcggggataacataattgacaaatcgtcaaagaaaggatgggaaacaataaggctgactacaacttggaattgaaaatgtaagggtggaatgaaagtaagcacatgttgcggcaaaagataacagcaacagattagaatggaatatgacaaaattaacacgatatccgaaatgttactaaatttcagcctttggtcaacaaagctcacgtatatgcttttttgtagaacactagaaacaaaagcagagtttagcgattgtaatatgcagaataagaaagtgttagtccgagaaaaagatacccatcttgagaaggtccatatcttgttcagtgttttcaggacctaacaactttgaatccttgtcgtcttgttcttccattaattcttctagtgttggtgctacaaacggtgtatcattaacatgttcacttaaaggatcgtctggatctatgctattcaaatttaagttcataaaagaattttcgtcatcttcgctgagtttcaacagcaatgacgagggcaacgaatcatcgagatcgattggcaaatcgccaagtttcgaaccagggttcttagtcagagcatgtttttgtaagaagtaaagcatactagcatcttgctccgcgttataagcctttgaattcgctaacgtatctgtcattgggtcttcttctttaatgcaatccaattcatcctgatgggtagagtggtgatctaccttaagcttttgtatagatttcaaaggttcttgagaatgtgaagtcgaaagtttgtatttggaatagaactccatttgctcataaccatccaagaatttcatagcttcaatagtatcagagaactgagaatttggtaagctcttatttgatgtgtggctactacttggacttgatcctgtattcgtcaaggtagatgaattggaaagaagttgattgctcacggtacgatttaagtcggtagagaataaagaacttggggtagatgatgatagtaacagatcgtcttcatctgtcaaacttgcacgagaactcaaagaagaggtctgaaccatccttgaagaggaaagatttttgatgaagtctctatttggttcatcatcttcatcgaatttcaaaaagatttcagtatcgtctgcaggttctggtttcacttcgatttgtaacatatcagcatcattgtcaatgatagatcttttacgaggcaatctctcagtatgttcttgcttcacatgtactggctcatggtacgatttatttgtcattggttttggaagaatcttctgttgcattggaacactgctgttgacacttggtactatggtatgtggagatttagaatttgattcttctggtacgatagggaactgacgtttcaattcctgtaagttacccactagatcggtaagctccttcttaagcttattgttttccatcttaaggatcttgatctctttcttcaaagcagttttggaacctggttttttctttggctccacgggttgtgcagattgaatatgatctaaagtaacatccagctgttccattttcacctgtggcttaacttttgcgctttccattttagctgatggctttaaggtcggaattggcatgacttgtttcttgcaagcagctggtgcaattttggcacggatgggcttaggctgggtatgagtgatcgatgttgtctgttcaacttgtattgcttttgacttggcgtttgtagatttacagttagtcaacgggatagttgatgatgatgatgatgatgaggagcttgcggttggcactcctgtacggactgcagtcgttgtagatgacgctactgtaccttgatcagaagaagagcaacttttaccagaatcaataacagtggcagccaagtgttttttcgatcccggtctcaaattctcaacttctttcactgattccacaggttcttgtttaatcttggcattagtacttgaagcagaagcaggcgtagtggactctacagccatacccttgacatttgccagttgctgctttatcgataaagaaggactgggttttctacccggtttaggcctcggtggaagaacccagtgcctagacgttcgaatcgtgatcccagtgggtttctcatgtttcttcggctgtaaattaggagcaattgtaatctgctgatgaggcccagtgtgtccgtgaaggggctccaatgaaactggcctggacattagttaattcttactctgtgtctgaagtgcttttattatagaattctctccggaccagcgaaaacaatattaactggttcggaaccggagccgtaaccagagttgcgaagtatgcgtttgaaagtaggatacaaaaaccttacggcgagatgcaacctaaattagtttgaaccacctgcgatacgattgaatcacgcttgttgagtccttgtgtgtctgttagaacctgttttagtttcggagaagtcgtttgtttcggtagaattaactactcaacttttcaatttaaaccgaaattgagagagagagagagagggggaacaatggtaaaaatgagggcatgatacatcaagacgagccatcatgaatttatatatctcaggccataagatagtatggcctgagtactaagaggtatctcaagtttgaaatggggattgggtgttgagttgctaataattgatcacgtgaccatgaccccagatacaaagccacgctcccaaactggatcccccccctcctccccgttacagtactacgctagtactagcatgctgaattcacatccccaatcaatgcaacagcagcgtagctgctgttgctgggatcacctatcgtttaatttcttgatacctgcgtcgtttccgatgccacattctacaatgtggaatgagaagctaaaacctcataaaaataccctataaaaagcctgaatgagcgaatgcaattacaaactccatctgtagtcattgtagactagctaaatcattctaatgaggcatagctgtcaaccagatatatagttatttgacggtgtcacagcaaatatgtggggctggtcttgacatccccgggtaaccccttctgttttcgaaaagtcatcgaaaagttgagaacagaaagaactggaactaataacagcattaaacactaaactactcatcggattaacttctaagctttgtctaagaacgccgttccagttcgagtaaactgcgcatatccaagaaatacaacaagactataggatatggcacacagagcgtttatacaggtgattttcaccggggcacaggtgtttggacgtgcgtttgcggaatcttacagacaagcagcagctcaaacagctaaacaaacggcaaatgcttctagaggccgtggtgctagcgcagaatacggaggtatcactttagatgagagttctaagattttgaacattgagaatgaacaggatatgaatttggataaaatcaacgaaagattcaagtatttgttcgagatcaacgataaagagaaaggtggatcattctacttgcagagtaagatttacagggcagcagagcgtttgaagtacgagcttgctgaaaaggaaaaggctgccaatccagaactgaatcaagaacaagcgaagtcgagttccacgacggagtcaccggagttgaaaaaatagcgtaaggtcattctctctggcctagtataagttttgtaaatagttcaaataaaccgaaatacacgcatcgcatgctcatcgtatcatgttcagcacaatatcatcagtggttgatgaagctgatttatgtctacaactaattaatacaaaaattctctagaagatgggaaaactgttccatcatgaagaagggcacaacggagagtgaaaatccaaactctcaggcagccattacgcaaagccctctggatcacatgcaacacctggaagaacaactagagcgagctgttaaaccgcttctaatcatcactttccagacctcttcataatggttaaaagaaagaagtgatgcaaaaaaccgggaaaaggaagagacttcccctcccaactcaatgcgcttccaactttattgatctaagaaaccggaaacgaaatggaaactgtggccagcttgtttggggctagtcaggatccattcagctatgggttaaaaaatggtaacagtcactcttctccagtattaactaaagccgttcctagatctccgaagaaacctaggaaaaacttcttgagaaaagagataaccgaaaccgtaggtttctatggtgtatatgtgtattaatattatcttgagatagtactaaccactactgatgattggtttattaagaacaaacatcaaaaagattttccaatctttgaactgtaagagtgtttgaaagaggttcaaagtgttgaaaaatttgccacttttatactattgatcggaaagattacccggacatacgtctctactattataattgatttagggttttaccaggtaagatatcgttgaccagacaagcatgttgcagatatttggggcccttcatggtgtatattgcctagtcgagaatcagtttatatgaaatgtaaatctgttcatccaagtgggatcttttgagtcgaacttataagcaatatactgctcatcttgcccatgcagctcgtcctactcactgcactgcttaataagtgtcaatatccaggaacttcggttacttagagtagtacccagcttctgggctgtggcaccagcagtaactataccgtttagatttatatatagttatagaaaggttcgggtattaatgtctgtcagtccaagataatgtgacgttaacaaccatttgacagtaaagcttccgaagctgctactttcgatccaagttctcgagtctatgattcttcatgagatcacctggacagccacccaattgttacaatagacctcttgttggctgatcggttccaccttttctttcataacttgagaactctcatcttttaaagtgaaaaagtctaatattgagagatgagccttagcaactgagaaagtaactactcgtatccaaacaacacagtaaaaggatatacatagcactggaataatattgccaaaacagtcacaatgacgaaagaggatgctattgagtatgctataaaggaattgcccaacattttgccactagatacagaacagatcaaagatctatgtgaacagacgataaaagaaggcaacaaccctgaacagatagcccaatccttttttgatcttttagggcaagacgactcatcggtacatttcatatttgagttcaatgagaggctcatggaattgccccgtaaaacggctgtcaagaaaccaatagtgaacgaaacaaccaatactaaaaaagtgatatctccattgattaatactgtgaaaaccaatgattccagggccgagttcgccaacaagtctattcaagcaacgaaaccgatattgaatagagaattaaaaaaggtaccgactgccaaggctgtgaaaaaggattcggggaaagagagtaaagaagtcagattagattcattgaaggatatcgatgatgtgttaaagatgttggagatgaggtcagtctctggggattccggtcaatataaatgcaattgccagggaacaaggcacccaatattcgatcctgcaccaaactgtctgtcatgtggcaaaataatatgtgtcaaagaaggtttgcatatgaacaattgcagcttttgcggagctgaattaatcccagctaaggaacgcgaacaaatcttagaattgctacggttagagagagaacaaatagagcttcagaaagttgaagagaacaagcccaagccgaagcaaaccaagaaatataagattaaatctggtgcaggcacaaatttatggcaagaacaagagaaaatgctacaaagagtggagaaagatcgggaacaagagagagagattaaacgacaacaaatattgaatggggagtcaaaggaagaagaggaggatgaacaacttattgaagcacgaaatcgactcgacaagctacttcatttccaggataccagtgctgaaagaaccaagatcattgacaatgctagtgatttcgctatgaatgaagatgtcatgtggggttctgcttacgaaagagcattacaactaaagaaacagcaaagaaatttacgaaaatgggaaaagattgagaatgaacgcaatggaaggcgtgaaaaggtcgtcttggacttgacgatcggtaaggatggtaaagttgttatgacagaagcagttagaaagagcagcaaaaaaacgaatgcaactagtgatgatgaaatagatgatattagcgatgaagaagatctccaagacttggaagatatcaagaatttgaagttagagataaatcaacaaaaacagaaggagagttccaagttaacaaacaatgtttgggattataacaaggcgcagtcggagtttaagaaacctgtatacatagcaaacgctgaggaagaaaaagaatctgctcctaaaaaggtatcaaatgaagttcatcgtgtccaagtaggtattgatgatagaccatcacttcaagatagcattttggcaattttgtgaaatttgtctgcccggaccgccgatgtttccataatcaataaataaatgtgttggaaaatttatatatagttacatatcgagcaagcgttacggttggaacaattcgactatcattcaatatcgaaaattggtaagaactggcccattattaacattggaatattaaatgcatctcttttaactgtccaaatacatgcacaccgtagatagcatccattctttaacaaaaggttacattcgctaaaaatagcctgaccatcagaagttccggtcgatgaattgaagggcccactttgagttgaaccaaatgccaaatactcatggaatatatcatagtaatctactatgctttcattgtccatgaattccatgataaactttcgtttgtttaaaatctcctttttgttgaacccggtaagggatataaattcattagaagcaaagcatatctcccctgaccttctccatatacacattggggtacaatttacaagtttggccatgctttcatactctaacaatgccctttggagaataatttcttgtaattttaaatcttgagcaattaaactattagttagtgtaacgaatattggtgcataatgtgttttaatagagtgggctatattttgcaattgctcggggccatccctctgagatttacccgaggaaggtttatctgaattaatgaatctccatctcaaaaatcttaacagttccagataagctgacttataattatgcggttgaattaaagcttgatgtttgtacaagtcctcaggtgtcttaaccagtaatctaaacctgtatggactcaaattctccacagtttcaccaccttgagattccggtgacgtatcatttgcagaatgccttttagattcacttgccatttgatctaacgatatgtgcggcctggaatgcgtccttttcaacccattgcttgtgagatttagcagttcctgagtattgataggtctttgagattcagtgataggatccattttcatcatgttacttggagaccacgctatattggaattcaagtatgtctttgagttatttcgggaaaggtttggtgtcgatagcatatcattgagctttgtatattcttccgtagtccatacactcccgaactccccagtgctactgttgctgctcgtatgatctgaattcagcttctctgggattggcagcagctgctgtgctggttgttgcggcccctgctgaggtgctcgctcagaaagtggtttattcttaaattcctccaagggagtcttatcagccagagagggtaaattggctgcactattctgattacttggcaacaaggcatccgagataatgggctctgcagttgggttgaataactgagtgagactgggaatcttcggcaactctggcgacataactttcttctgtttcccaaacatatcagatggagaatttataacgggcatttgtaacggtaaagaatccatagctagcttggagatcctcgtcttctttgtcgaaactccagtttgcttggcctttattattttactcgaattttgtctattgctaacggcagttgcagtattaataacggggatcagttgttgattaatagtattagatatctctgactttgtcgacgccgaaacctcacgttccttcttaactttccgcggtccgcgtttcctgggcttacgctccttatccctacatgtgtcaccaatcccacgcttcgagcagttttggcagggtctaccaagatcacattgtaaatgcttctcatggcaaaacacacaagctgtcggtatcggttttcgattcagtttctcttgagctgtaagtttcttcgtcattacaaaatataccaaccataaaatacaacttagttcttataataaatagttccggtcgaggaataataccttgttgaataccctggtctcttccaaaattagaaaagcgatcgaaaacagcgatatctgaaaggctgaataactcagtattagagtcttgagtagcgaatgtctcagccaggtgatatgtaccgtttccggtatataagaagttaatttggataattcaaacgaagttcttaaatcttgtttgtcattttctttatatctggggaaaacattcaaaaagtgttgatgatttattttgaatcagcaaagggttcaagacgaactggagtaaatcgcgacctttaaaaactctcgcttagtatactagcatttaaaagctgtactaagggggtaaaagattggcttttagtgtctatcaaatgtttatgtagtgcaaatgttagaaatacatgagttttgaataaagtatatgtagaagttggctggagtgagtttacatttatgcaaagttgaattcgtcgttagattgtctcatggccatcttggccatacgtagcattttagacttcgagtcctcttttggtttcttttgggaagctgcagcagcagctccggctttaccttgctggagacccatcgatttaggtctttctcttagggcaaatgatttggccaaatgaccaagatgtagacatttaaggttgaaaaacttcttttcgatggaaagatgggtagcatacgctctgatgtgggacatgtaccccttgacagccaattccttgaagtgagaatcttcgattactctcctttcaacgtttaagtgccaagtagtagcgttgttgtcccaagcttgtgcttcatgtttgtcccaatcttccttctttttatcggttcttcggacgttgagcccctcgaatgcaggcctcaaaacttgctcgtcgtatgtgagtaatttccaaccttttggatggtacggtttgatgtagtccatgtatccttcttcttcaccaggtaagaggaatagtagagattcaccttcgcaaccagcacgagcagtacgcccgattctgtgtaaatggtcttctactgcaaacggtggatccatttctataacagtactcacatggggtaaatcaagacctctggatgcaacatcggtacaaaataagatcagatgcttacccttggtggcatcgttattcgtggcgaagtgttttaaggttgcggttcttgtttgttgcgataaggacccatgcaacttgtaacatatgacgtttggatcgtccgtgtcgttgaaacatggaagtatgctgttcccctttgtgagaagccttgcggtatctccaacgagacctctatgattcccatcatgcgatgaaaacacttcgtagtggaaatctacactatcagaacaagataaaaacacaatggttcttgttacgtctgattttgatccttctttataatgcttttgagttatagttgtcaaagatcccgctagagtaactagccttagctttggtggcactatgacaatcttttgaagtaattgatctggtactgtagtagtttccgtttgtttttgaccactgctaatcaatttgtagttttgaagcgttacattgccaagttttgtcacgttacctttcacagtagcactacacaagacgtgtaaaattctctttggcaacttggggaattgatgagtatctatatcgataccatgaatgatattgaggatttccttcaaagtctcttcaaaccccaattccatcaacttatcaccttcatccaaaacaacatatcttaaacttggagccaattgttctttaatgacttttgtgttctgtaaatgatccaatactctacctggagtaccaatgataaagttagcaccttttctcaatctcgccttttccgatttctttctttcaccaccaataaggagacatggcacaaggaaatgacaacattgagcaagctcagaagtcacttgataaatttggttggccaattctcttgttggtgtaactacaagtgcaaaacatccagattgtcttgtgatattttgacccaacgatagtatgctttggaaaattggtaataaaaacgccaatgtcttaccagaaccagtttgtgcatgaataaacaagtcgttttgtgcttgtaagaatggtgggataaccaacttctgaatcttagttggcttagaaatcttcatcttgacgtttaagtgtgaaaccatcgtgtcagtgataccgaacgaatcgaaggtgtcaccaaccaatggtgcattggaataagtcacttcggctttttcatcatgagcattactattggtaactgtgtcaatatttctactggacgtgaacaaagaggaaacgatttgcgagtttagctgtaatggttgcgttaccctagctggttgttctacattagaactgttatcaaatcttgatctcttaggttctacaggtgcctgtgccgaagttgaattcgaagaggaggcttccaattcttcaaaagttggtgctccatcagattctaatggtctcttttcacccctgaccctcggtttacgaccttccatcatcattttggcctttctcctgtccttccatttaccaccggtaattttacctctactgactgtttcactagcatcactaacgtcagttgtaaaatttaacagcattccatcatcgtcatcattgaaactcatctttacctacttgatgatcgttgatatgggctgctgagcgacgtacagagactttcacttcatctaatgtcagctcatcgcacagttaagtcctacttccatattaaaattttctatgcttgatgtcaagaaaaagcaatacaaaggtaaatactcacagaattggataaaatacagttagattggcgactatcaggatcgtttgaactggacatttgacactgtagtggttcgtgctatgtacaggtcatgttatgtgctgaaattgatatctctttggtttcattactgattcaattctacaaaccttgtctgaagtttaatgttaaagcatattatatacacgtagaaaggcagatggacagagacaaaagtcgcttatgacaaatattaataaggtggtgatgaaatactcgcccagccggtatggaaccagttggaaggtgataaaccatccttttacagacgcttctctcttcttgtttcaatgatcacaagacacggctcatcgcatcgattgaaattttgacatttcggatgagaaggctcactcattagtacaactaatgagtgttgaaccacttgtacaaccaactattgtcctgtttctatccaggtatctgtaagagggtgtcagtggtctcaaaatgtctaatggtttgtttgttaccgatgaggacggtgatactgagatgaatgggaacggtaaactcgataagaagctccaatcatcagagattcttaaagaagacgatccagtagtgaatgaaatacccattaatttaacggttggaccttgtccattgcatgtgttacagtttcctaacaaacctaaaagactggcgaagaatatggatgaacatcctccaattgctggtgtacgctataaggatgaatcaagcgtttgggagatagatatcccattgaatacacaggtcttcttcgacaaagaaaaagctgctgagtcttggaacaatgtcgacgttcaaactttgaaaggtgtggctgtaagcaacgacatgttgcaatacgcaggcgttatgaaacaaggacagctatatttaataccagtagagaaagttgcccaaatgagaccatacttccgttacatcgattcgcatcaacaggttaagaaggacgaggatgccaaggcgaaacctgcgaatccaactgccaagaaaaaccaggtaataacaatgtcagtgaagagtagcagcgaagcgaatcaaaatagactaggaggtgcattgctagctcataaggtagcagacgaagaggaattcaaacctttggaatggaaggacgatactttcgaatcgtttgtagaagaagttacaagtgaaaaaagtactgtaccattaaaaccaatggacaacgacgctgtgtatctatcaaaactattttaattaattatcgtatttagtaagtataaatatatattaaaccgagaagggatcaaattctccttaatcataccacatcttaatcaactcctcagaaacagcactaggtgtcaaccctccaagatcagtgatcaaagctgtgatgtattcttgacttgtaaagtcgacagaaggcccactcaatggttcttcatcgtcttctataccgtttttgctaaaatctaatggatctctttccattggaatatcatctgacgaaagagggaacatacgtacgaacttatgcgactcactaaccacatagaatggtttccttgcattcttcgccaagacaccgatagaatacgttcctactagattgataatacctccagattcagcaacaccttcggctcccacaaagatcttgtttaccttatggatgatcgtaccaacagcattatctacaatcattgtcactgggatacccttctttttaagtaaatgatacagttgcaacccttggccagacggtctggattcagtgacgatacatctaaatctgattaacttctctgctgcatgacttagtaaagagaaaacagctctggaaaatccatgcactaatatgatatcatcatcggatatgaaatcaatcccaatctcagcaattctatctcttgattgtttagctctactgacaaataaatgcccgttttcaatcaaatgctgttgacaattttcccaatcaccgtacaaatgtgtgttcttcaagacaaatctcataaatatatcacaacctgcacgtaacgaaattgagtttggaatagatgtagtcaactcttcgatagctagctttgtcgatttgatcatctctgcagatgttttgggattcttaactttcaacatggtaactaatgcctcgatggcagcgataggcatagtcatttcactgtcttcttccaaaaacttcaaataagtttgggtgatattaaactcttgcatcgtcatttcgtttggtatttctctattgatcctgtttccttgcactggtatgtatttaatgtgtcactgacagtacccaaatggccactaactacctagtttaattgtctttgaacctcacttgaaccattttggctggttggatgagatggttccatgctttcaatagtgaaaagttaaatccgtaagtcatgatttttgaaatgggtgatgagtctgaaatgttgttattaaacaccgcacagtgtgccacttggctcatcattggaggtactagttgaatccttacaattactacattctcgaaatgtctacttgttaatcctggagccattggctgatatttaactactctttatgtaatgtattattcgagtgctattaaactgaatttattgaagacaatttctaacagtaccgtaaaccttcgagacaaccatcagaaagactagtataaccagtgaaggttcgatttcataccagatacccttaccaagctctgcaaagtagccaatgcaacatacaatgtcgtttaggatatttcttcgaaggtatgccactaagcatgatctgagtaaagtcagaaacattggcatcatcgcgcacatcgatgctggtaagacgacaaccaccgaacgaatgttgtattacagtgggaagatcaatagaataggtgatgtagatcaaggtgatactattacagactatctaccgcaggaaagatcgagaggaataacgattcaaagtgccgctatatcgttcaattggaagaaagattataagatcaatcttatcgacacacctggccatgctgatttcacattcgaagttatcaggtctttgaaagttctagatagctgtgtcaccatcttggattctgtagcaggggtggaggctcagactgaaaaggtttggaagcagtcaagtggcttacccaagatctgtttcttaaacaagatggatcgagtcggtgctgggtttagcaggacagtgaaagaacttgtcgtcaaaatgaataccagagcattacttataaataccccaatatttcaagtagatcctgtgacgaatgagtcaaagttcagtggtgtgttggatttaatatatgggaaacagttaatctgggacaccaatgatccagacaagataaatgtcactgatgtcgatgaaaatcatgactgttatgaatatttggttagaggaagagaagcattggtggaaactcttggtgagactgatgaatctattgtggaacattttttcaatgatgctgatggagagtacctaaatgtttcaccagaagtgttgaatgcatctatcaggaaagccacgatctctttaagtgcaacgccagttctttgtggtgcatcttttagaaatatcggtgtgcagcctttgctcgatgccattgcaaactaccttccatctccttcagaagcaagacctccagaattgaaccacaagaacgtgccaatcacgcaaaaccctttaactggattggtattgaacaaaaacccaaacctgtgtgtcgctttggcctttaaagtcattacagacgcaattagaggtaccatgatctttatcagagtgtattcaggagttttacgttctaaccatactgtctacaacaccacaactgggaccaaattcaagattggtaaactagttaggatgcatgctaacgttcccgaagaagtcaacgaactatatccaggtgatattggtgttcttacaggaagcaatgtttcggaacatatcagaactggcgacactattgttactcatgtaaccaagaaagatgggttacgttcttttgataagaacgtagagctcacattgaagataaacccaatagagatccctccaccagtatttaatgctgccattgaaccaaaaacattgggtaacaaaaagccaatggaacaagctttgtcacaattgactagagaagacccctcccttgtggtaacacatgatgaggagactggacaaactttgttgagcggtatgggggagttacacttggatattgcgagagatagactattgaacgaattaaatgcacaagttgatgttgaaagagttattgtctcctacaaagaaacattaaatcattctacccaagaaaaaacgttggaaaccgatgatggatacaagattaccgctgtaatcgagccattggacgaagagatgaaagctaaagcgaagaaggacgaagaatggttctcgttagcgaatgataataatttcatgatcatggaaaagcacaccaagtatgacccggataaaaactggcctttccaagtgccttatgttgctgtcgtgaatgcgttattaccaagttctctagttgcattacaaagaggaggtaagatcggtgggttcccattgagctcttgtgtcattcgcattaaaaatgactgggatcttccaattgatgcgccatcgatttcaccattgttgactttaagcagacagctatttactcagatactcttaggagaagatcaatctaactactctgttttagaaccagtcatgaatgtcgatgtcactgttcaacagcaagacatgggacctgttattcaagatctgtctagtgcaagaaaagcaaatatcttgtctattgaagatgagaatactaatactgtcagcgagtctaacataaggttccaacacattgcagacaagatgtggctgcctgaggatcctactttagaattcgctaaacttggtaaagaaggacaggcacccaagatggtgaaagcccaagcacctttgaaagaaatggttgcatacaacaataaaatcagaagtatcacacaaggtagaggctcattcaatatgtattaccatggaatgcagcccgttactcatgacagactacaatcagttttggcagattaccatcagtaaatgccgcttcttattataaatatgtggatataactcttgtatatagaataagatatatcaacactatcattatttactataggatgcagtttagaattatgttcggagtcaggcatcatatacaaacttgactcacttacatctctaaaacttacactggaaattggcagcataaggtccagaatatggtcaacatcgagagtgaatatggcaagttcttattcctcgtggcccaatggtcacggcgtctggctacgatgttagctacttctgaaaccagaagattccaggttcgagtcctggcggggaagaactttttttgctactttccataagaactacttttgaaagaatgtaagctgcgatgaacagacaacatgaccgcggtattcctggttcctccgtaacagctagcccatactgttcgagatcgataaccccttgtttcatttcctttctcggtctttttttttttcctttgatattcggtttggtattgtattcagaggaagaaactgtgtaaattgtaattataagatctatgggctatagtatactgttctgagttaaatacattgcaagttcttcacccaagaaggcgctcaattcattctttgagtcgtcatagtgagtgattctataagacaaatgcaaaacgtcataattaattctttgagagaccgatgatgtttggtcgtactcagggtggttcaaaatgtaggtacggataaagtttgcaaaggagggcagcttaccagaagctctgtcactgattagttttaagtagtggtacaatctgaccaattctgcattccctgtattgtctttcaattctgtccaagatttcacgatcagacctttacgtgctagaattggattgatcaaaatggcaaagataccattatggtggttatggaaaatttcgtcgatacttagcagttctgtcttaccttgaaggtcagagaagtcggatttccaatagaacttctccttcaaagtagcgtcacgatgatgagcagtttccatgtttttccaaatttcagacatgtacatgtaagcattaatcttatcgtcgaaggtaagaatagattctaccaacaaataaatgagattggaatatgcagcattttcgaaatctgtcaattgaacttccatgggtctgaattcgaccctccaaccaggagctcctttattatctggggtcgcactttgtgaagggaccttaaaccggaccgattgccaattagtactttggatattttcgaaatggtcagtttctgtttcgttatcctggtcaatcctttcttcgaagatgaccagtggatctctgatgaaaagatgggcgaaatggcgagccaagtctttatcaagtttgaacttttcgttatctaccaatctcttgaatactttctcattgataggaacctcagtgtcgttgaacttggagtcatagaactcgttaccaccgaggtacaaatccactacactataccttgatttattgatccgtgccgttgaagcataatcttcagttgcgataccaccatacccgttattatacttgggtagcaatggctccactgatctttcatatggagtacgatcatcaactgcacctacgataacgttccaacgcacgtcttgatctgcaaggaaccccttgaatactggagaggcagcagttgcggccaagaaaattggcgcaaaattcaacaaagtatcgtacaaataacgtgccttattgatattaggagcctggaaagtcaattgcaaacaggaacaccccattccgaaccccattgaatccatatagatatatcctggtttagaagctttggcagattccaaatcctctggaacaaaccaatctctttcgtgaatcgacggatcagtttccggtgtacgcacatccttgtatacaggaacgttgatacaaactttctcaccacgtctagtcctaatattggctgtcaacgtggggaacctagcgtgcctattgataatctcatcgggtaaaaacagcgacctactagccgaatttttatgatcccatgggttcttcaaattcgtaaaattgtcacgacccatgcgtgggaaaacagccaacgacaacggagtcaccaagttcacgtcgttaaatttcttcaatttctgttctgccacggccctgcgcatctgcatgttcctctcaacctctgcaccctcgaagtccttatatggcttcgcaggtgtcgcctccaacataaaccgaccgtactcgggatggaaatgaacgttcaactcgtcacactcggcctggtattccgtattcaactgaaccaaaacctcatcatgtttcacactaagaacaacgttctcattagcctcatcgaactcacaaatcatatactcgacttcatctccccagtacaattcatcgccgtctctagactcagcactttcaaaagaattcaacaactgttcaatcccattcacacgcacatgctcattgtacttgcgtgagtctagccatgacatgggcgtcccagatgacaacaaccccatttctctttctctttgaataagcctcccttaaatgcagcgaccaaaaccaccgctaagacagtaccaaacggcgccaaaaccactaccacaaaaaacctgagattgacctgccccaaatacaacaaagaacccactcgaattcctgactggttcaccttctatcctcaaaagaaaactcgttcgataacaatgttgccaagttctaatttccgattttgtctatgttatatatcagctcgaactttttcaaaatttttcagtagaagcctgccacagtttgatgaaaagacgaatgcaagccatatacctacttctagtaaacgggttgatgtcagatatgacctggataacccctctgtatctataactgtatctgtgtttgtatctctacgtttccgtccggtttggaatctacttctgtatatggtatctgcggccaccaggtgtgttggctgaagaaatgtagggttgcatccacgctgactaatatgtagatatatattgtggaatttgtaaaggcaagtgaaagttatagtatagttcggcttgcggttttaggtgtcaattgggtgcggaaacgctgctttacggtcgcatgataaggtatctggtatcaggtaccggctatcagattagtttagacgatttctgtaatgactctaactgattagaaaatcggattggaaaaaagttaggaataaagagcgtacttcattgcagcaatgcaatggctggttagtttgtgtgtttgatatccatcaggatatcaaggctcaaggtagtgcagcaatcctgggattatgctgcaacctgtcgtgtcgagtaatacttatgaatggttgaaatatcaggatgaaccgcattacgatgcaaggacagagtactcattgaataccatagactcgataggcagatggagcacgcgattttggaacgatgctttaagtcaggtgtctcatctggatccggataaggctcgtcagtcacaaattaagattgagtattcggttttccaaccgtcgat

SEQ ID NO: 20 - DNA, 2602197 bp, Kluyveromyces lactis (residues 1,301,100-2,602,197 of 2,602,197)
taaatcaggacccgtacccaagagtactgatagtaggaacgaattcgatgccgtggtggaagattgcgtgcacgcaatagagtttgctcatttcgatttgcaacggatagaggctggttcctctggttcgtatttcgtatttggtaccgatgctaacttgatcaaaggtgtgtttaagccaaaggatgaggaaccttacggtccgttttctccgaaatggacgaaatggttacacagaactttctttccctgtttctttggaaggtcatgtttgattccaaacttgggttatgtttgtgaagctgcggctagtttgttagatcgaaagttacaagttggacttgtacctcatacggagattatctcgcttagttcgacgagtttttacgattatagaaagaattggttttgcgggttcagaccaagagtacagacgaagttgggatcgttccagcttttcgtgcatgggttcatttctgcagattcattcttgaacaagtaccccttgcccacgatgtacagagaccatgtgatcgatcgcagcggtcaagagtttcattggaacccgaatacgctgaaacagtttagattgcaattggaacggctcatcattttggattacattatgcggaacaccgatcgcgggttagataactggatggtgaaaattactagagagtcagatgacaccgaatggcaggtcaaacttgctgcaatcgataacgggttggcattcccctggaaacatcctgatgaatggaggtctttcccctacggctggttattcttgcctgtctcgattttaaacatgcccttttccaacgaaactagagagcatttcctaccaaggttgttgaataccaattggtgggaggaatcgttccatgagttcactcatcttttcgaaaccgattccgagtttaaatccagtttgtggaggaaacaatggagtgtattaaaaggtcaggcattcaatgttgtggaaacattgaaggatcccagatgcggaccactagaactcgtgaaacgaacaccttctcttgtgattgatggtttcgttgagtacactttctaccctatccaggaaacgtcgttaactttatcattgactgaatctttaccaaagagctcctcaccaatgattgttggtagcattcctgatagatttgaagacactctgcaccaccatccacaccccaactactctgagaatcagaaccagaacgagaaccagaatcacgagcacccagaaaggaagaccgtcattatagaaagattagaaatatgtaattccaaaccaccgttgttcacatggtggtgatagccaatacacaccctaatatacacatatcaattacataagggcagaccatctacggcaacagatacggccgtctgtaacccgtctcatcccatctcactatccatcgttttcactggttgccagatctgctcggcacctttggtatagtaactagaaaaataaatactttaaacagggttttcaatcggataagacacttaataaacgatagttaaagagaagaaatgtctagagacagcaagggccctttgaggtacgtctttccagttgaaagttagtcaatcgttttatttaaagtcaataaagtaggctgagaaagatgagtttgctttggggtagtaagaagaaaccgggttcaaggcccggatcggtagttttgactgatcaaaatggaagtgctatcttcgatgaattaccaggcagtaagaaacaaattgatgataatccacgaatcatggagactcaatttggtgaaagtttaggcctacgtaccaattccttgcgtaaaattttggctaacgagaccgctggccttgggtttcctgacttagtccacgttgcacattacgataaatcgcggaaggatgaagttggagagtatcattacattactggtatcgattgttcatctgaggctatgccgattggatacttaagtactctaaggctgagacaaaattgggctagtgagacaatttctacgttttgctgttataacttgttctccaaagttgatctaagaatcaaatttgagacggaaaaatctttccaggttagtgcaattgattgttctactgggaatctacatgtccccatgacagaaactctgtggaaggagacgttccttagtgggataatccgcgcattgattttcaacaaagatagagaatggaaattaccaggtatggttgaattaccaataggaatcgataacggtattgcatcagctcaatccattatcaaatcgttctgtgagtttattccaaggtataaggaaacagggttagatctaagccgaaacccaactgtttctcccttgcataactaccttgttgaatcgttgttatcctttcttgctgtgactccaaggttgcaccattactgtatctcaatcttagaagaattgactgaatctgatgccaagaatggtgtcttgtaccagatggtgaaatgtaaggttgcattccattccaacaattcagatctcttgacagcgtcatcgattaattcattgttgaacagttatttcaaaaatgtaaacaaactgaagaaatcgcaattgatcatgctaacagacttattaaatctacaaatcgaattcttgatgaagaaagaggattatgaactcgctttacccgtagctctttatgctacacaattggtgccagatagtttccagtcctggtactatctagccgattgttacatccataagaaggaatacgattctgccttgttggcgataaactcgatccccaagttgatgatcttggatccaagtaaagatgcctactggtccattggcttggataaactgtattacaagaaacctcaaggtcaaggtgcagaaagtacattgaattcgcacgaatacaactatgcgctaacgaagctaagacctgtcaaagaacgtgacatgaacgacatcacttttggtaagataataatgccagcaaatagctatggatgcattagaaatatttacgacacggcatgtgctcaaatcggaccagtatacggtcccagatccaccaatttgatagacttcgtttccaacgaagagatcggagcagtcgcatacactgcactactagaaagaaactctttgaagaacaagatcccatggtatatgggccaaatgtatcgcctcttgatgaaaattgtgaacttcctgggatggaatggactactggaattaagatcgtcaattttcgtcatggaatctgaacacgtcgattaccaaaacaagaccaacccattgttaagacaaaagagaatgtgtgagaaatggctagacactctgttcatggaagtgtaccaggatctaaaagtctcattgaactctccagcgctcaaggattccaagagcagtggcttagaatgggaactcttaggattactacttgtgaaaaccgcaaactggaatgaagccgtagcatgtctcagaactagtatcatggcgcgctttgacatcattgctgcagacacactactcgacctgtacctctttgggcctgagaacttcccgttgactactgacgaagtgctatcgatcttactgggaaactgttcataccattccagattttacgacacttgccagtggcttaacctacaagtcctatacaaactaaacgaagaactgggtacagaaacactaagaaacagaatatacgcacacccgctggcagaacgcggtatagttactctgatagacaaggcgctcgattggatccagcagtttgcataattgaatgactgactgtatcgtatatatatatatatatatatatatatatacttcatatcatgtatgtaaataaatgtatcaaataaagatcaaagtacagaataacagataaataaataggaattaataggaggaatacgacatataatgggtagagcacttctgttaccagtaagaatgctctcaccgaacatgagaatgatgagattgagtctcttgattgccattaccctccctctgttgccttgtaaaaagttttttactcccagtgaactatcgcagaggagctcacgaaaggaatttcgtaaattaaaaatattcagaatcaacaatttcaacttgaaatggtttgaatactggaatgggattgaacggaaagtgtggctaaaagagcgatagcagtatagatcggattgttttctgagtgtttcggtctagttgtcagagttatattacaaggctagctttggacaattgtgttaaagggtctgtgatatggtgacgcccccttaaatttacgttttcctttgtgtttgtatatttttgtttaaaacctgcgatttgtttgaaggtttaaacggcaggaaacgtttgctacagagacgctagtaaggtgatacacgttggttgtactgttggattctcggagtctttagtatccggaataataaaaattttgttcatctttcatttccattttaatttgtttactggttggttttaattctgattgattgttgaatcgatcaatcccttagcatatatccctttcatttcatcttttttcgtgttttaaatgtctggatccttttggaagttcgggcaggattatgccaatgaagcgccattgacgaagcttttgaataaggcgtttttcaagatcaataacaataatagtggttctgacgataatcacggacagaacgggtccggtgttgatagcgatgatgggttgaatctacgagagaagaaaaacatgtctgaacttacgtctgagtctgatagcgattgtatcagtggagaagacgattctggggatacaggtgacgatgacgatgtagaaaagaaggaggaagagcaggatgatgaggatgaagatgatagagcactggggcccgggacgacgaaaaggaatagtggacgtttcaatgatgaggacaacgagggaggagaagaacaggtttcaatttcagagagtaatttcgaatacaaggactatcgtcccaaccttgatattttagacgacttgttggatgacgaggaactgtatacagagcttatgtgctcgaatttcaaactattggtgtttttcaggtatcctgaagtgttagcaaggttggttgattatgtgaccaacgaacacgtattagaaccagctgacgatagcatggtcgatgaggaacaacaagaaggggaaaatgggtcggattcatccgataacgatgcagaggaagatcagggtaaacaaggttctccagaggcagaagcggattcaggggatgacttagagaattcagaagatgaaaataatactcaatcacaataccaaaatacactggacgtcgttccagataatgcatctgagtcttcagctgaaacgagtatcactctaccaccagaaagtgaagaacaggtagagtcaagaagagccaggatcgctgcagagattctctctgcggatgtgtggaccatttcctctgcattcatggataacgaagaccttctagtcaagttatggtccactttggaacaccctgctccactttcaatcattgcatccacatatttcatgaaaatcaatgaacgtttattagatatggacattagtggcatgataaacttcattttaaaacaagagaatatagttgatagatttattgcacacatcgataaccctccattgatggatttccttcttaaagtcatttctacggataaaccagatgctccaactggaataatcgcattattgaagaaacaacatttgatatctaaattgttagattatttatcaattgaacacgattcttcaattcaatctgctgcaggcgatttcttaaaagctttgattaccatcagtgcaaattcaaataacgaaatcgcatctgctataggtcctaatgagttgactagagaattagtttccgcagaaatggtttccaaattggttaatattatgttacaatgtggcacatcgttaagcaacggtgttgggatagtgatagaacttatcagaaagaacaattctgattacgatttcgtacaggtgatgtatacaacattggaaacacacccaccatctgatagagatccagtgtatttgggacatttggttagatgctttgcaaataagatggatagatttaacaagatccttttggaaacgaagcttgacccattggagacacctttcggaagcattgagccgttaggttttgaaagatttaagatttgcgaacttgttgctgaacttttacactgctcgaacatgggattgttaggtgaaccatcaggagaggctattgtacttgaacgagacttgaaaagagaagagattttgaaagaaatggaagaacagcttgagaatgaaaacgcatctgatgcagaaactggatattatgacggtgaagatgatactgctcatgctaataatcttcatagggaattacaagacctcaatataaatgcgacgctgaaagactctgaagctactgatgaagtagaggacgtcaaagatgttggagatgctggagatgttgatgcttccttggctgaaagaacagatatacattccgaaacttcatcagattctgaagttaccgaaaaagttctgagagaaaatccagttgttggtgatttattgaaaatttctttacaagataacaacatcattacaaccatacttgatatgtttttcaggttcccctggaacaatttcttgcataacgttgttttcgatattgtgcagcaaattttcaatggaccactgaagtctggatataacaaatttctcttggcagatctcttttcttctgctcatattaccgatgtcattatggaaggcgacaggaaatgtctagagtacgagaaagagactggaatcagacttggttacatgggtcatttaacattgatcgccgaggaagttgccaaattcgctgcctatatagaagaagccaatgtgactttcgcatcacctgtagtgcaagaaggactcaatgaacctaaatggaaagagtactgcgatacaattctcaccgaaacaagagaaaaatatagctctttactcggagatgacggtttcgacgaaggtgaaaacgacgagggcgatgacgagatttacgaagacgatgatgctataaatgaaaacgagaaaaggtttgtgaatgtgaacgggtccctggagtatgacgatgccgatgaggatgaaaatccgaatgaattaggtgccgacaactgtttcgtttatgaagacaacatgggtaataagacaaaaatccaagtacgactagacaacaacgatgagcatgactcgtcgtacggtggagatttgaataagtttagcaactacatgtcaaatcagattaaatccggcttaaacatggctgacaatgccgaggaagaagacgaaggagacgaagaggaagatatttggaatggtgaatcatccaacacattccaaccgcaagtccccaataaaaccttcttcaacagctccatgttccattcccaccaatttgatctgtcacctgacgatgaagaagattatttagatcctaacgacgatgggcaatcttatgcaaaaccaaaccatcctttatactccagcatgttatcaccgggtggtatgccctacgatgcaccagacgaagaactcaacgatcttgatgtaaacgacgatgatgaggacgacgacgaagatgatttcgatgctgatactgatgttggaacacatagcggcatttctcatcgttcgaatgaatactccctgcgtcgtacttccagtaatgataagatcccttacgatctcgctgagcagagtagtagagcaatgggaatgcctgctttgcaaagatcaagctcacatgatacagattaacaatgcagccttatccccaaacacgaatccttatcaacacaaattgatatataataaacatttacttttcctctgtttatcgttagttcaagtagtaataatattaataatagtaatagtaataataacatacgagtaacactaattcaaatcttaattctcatgtcatcaatacatactgcaatttgttaatttgggtattgttggatttctcttccttttcgtctcaatgcatcacttaattttatgaatctgaaaccatgaattcttgttattgacaaaaactggtctgtttagaaccgaactggatcttaataaattgaaccccgaagtccaaagagcccaccaatacactttcacacccaatggcatcatctaaggcttctatcttctccttccttcctctttacaacctactttctgcttctgcctgggcttatgtcctatatcaagtcgtgaccctttacccaaagatcggtcaaccaagtttctttattgctaccaaggatttagtcacgtacgttcaatgcggtgctataattgaagtcacaaattctttgtttggaatagtccgtgctccgctagtgaccactgctgctcaagtggcctctcgactcttggtagtcatcggtatcttccagtatgtgccggaagcagaaaatgcgcataaaatatattacatcacgttgttgtcggcatggtgtattgctgaaatagtgaggtacatgttctacttcttcaacttggtggctcaagcgcctactgtacttgttgtattgagatataacatgttttacgtgctatatccattgggcgtcggcagcgaattgttcataatttattctgcattgccgttggctgaagcaaaatacaatatcttgtacaagtatttcttaattgcaggtatgctagcctacattccagggttcccggtgctattctcacacatggttgcccaaagaaggaaggtcatgagatccttgaacggtgataaacgcaaatctgcatgaattgtcacaggattaaaagaatagtttgactcatgtataaaagttctgtaacatttgtaacatacccgaatgaatgcacaaatgaaacgacgctgtcccttggcgtggccgttggctcttccttctcatgactgtgtgtgtgccctacttttcacgtcacgtcacgtgactgacatcaacacttaactctcgaaggctcaaaaaattttctgttgaaacagtatacgactagttgaacaacatttaagacaagtgagaagaagcagattgaaagggctattgcatctgccaattgtcgttcgaatcagtgcagaaacgatgttcaagaatatcagtcatatgtttgccctcccagtaaggcaaatggtgggtttcagcccatttcttcaacctttgaagagaagtttcatcagaacaacacactcggtagcagaaaaagcgaaggtgaatttaacgccgttgaagttatccaatgagctatatgccgtattcagaatacacaacagaccatacttggtgacagaaggagataaggttatcttaccgtttaaactgaagcaagcagaggtcggcgatgtgctaaatttgactgatgtgactaccattggttctcgtaacttcaagctcgtggacgaacctattgatccatctctatacactattaaggctacagttcttgagaagacaaaacgcccgcttagagtgagagaagttaccaagagaagaaacaggaaagtgcgtcatgcggtcaataaagccgatttgactattctgagaatatccgagctaaaagtcaattaatgaactaaccctcctacaaaatcgtgtaaataaaagtttaatataatgttaggtcgttatagatcgattagaaatactataccatctagtaactatgttttagtggcagcatctcatcgaatttgttagaaacgtttaccgttttagagaatagatataaattcaaatagaaacaattgtaattaataccattttaatcgttaataaagaggggagaaagacgataagagaagagcttagtgcaacaattactgggtatcgatactttagtatctgataagtaaagtcccgctaaatatagatgaaccgtggatgatatgtctttcttgaagaagaagagtagcactgctggacattcaaggtcaggatctgcctcatctatactcaacaaacatgttgatcctgccaatatcagtgagttttatccatcgtcattggatcacaaggtgaccagtggtttgaagaacgattatagttttgattccagcagcaagggatccaggaagtcctctggtgggagcaccaattcgttaacatctgagcgactattattcaattgggatgtcactgatccgagccagtggacgatgcccaggataatacagtggttcagagctaacgatttcaacgatcagtggattacatttttcaagaggaatagtataagcgggaataagttcttgaaacttctagcttacgataattttgcaccatacgagaagtccttacaacagtccaagagttcaagttacgaaaggtttcagtacttattgaagaaaacgctggaagaaaacgtggtgaagggaaacaacaggaatggtaatcggattatcaataattcaaggtcgtcgagtgagtctgctaaggtcagccaaaggttatcgacatctttttctacccatataagaagtacatcagaatcggcgctgttgaatattgagaatattacgaaagacagttcttctagtgaacctaccacatcaaaaaagcaagaagcaagcaattacagtttacccttgaggcaggcaaagaccaatagcgcaagtgcattatatagacgaagcttgatcagcttacgaaatgcatcatctacgaaggataacgcatctaagaatgatatcaagataactatacccccaagacctctatctacgacagaaaatactaataaatcaccgacaacaccatcatctgttagtccctctcatacagcttataccggtattttcaggcgacaacataagaccagttcttcggaatcctccctgtttacttcgatttttggacatggtgtggttgaagagcctgaggaaactcctaaacccagaccagttgaaaatagaaggattcctgccgcatctacagtaaatgcatctacttcgaaacagtcgattaacgtagatgataaggctaggttgtgggataaaattaagcgaaagggacaattaccggcagaaccttcttctcagccagcagcaagaataatcatagaggaagttaaggaatcgccaaaggcggaaccaccagaaattgtgatacctgaagaaatatacccaaaacgaccctcagattcgagggaactcttcattatgttgacgaaagataattcaactttcagtccgttcaacgtccaacctcatcttggtacggatgtcagtgagctaaaaaaagctgtggctctagcacttgggttaacacattctaatttcagtattcatctgacagattttggagcggaatttggctctcagataccagacggtctattagctgactttcagaagacgtctttccaaaatattcctaacaaactctatatccaggacctagaaaagaaggctaatctgaatccaagaccaagaactgaaacactggctagtcaacattcgacggcagctagtacaaagagtaaaacatccgtgaaatcaaatgcaagtgctgcgagtaacggagaaggctcttcgtctgacttgacttcgatcgatgatcaaggctcttctcaccgtagagcttatccacaaacgcccagccactattatgataatagcacatcagctgaaacagactattggtcgttcaaggattctgtgccagagaccatatctgatgctcctcacattactttacccaaaagtaggcccagtcttaaactcaatagttctgttttgaatacacatgcttcagagaaaagtaccttccgaatcatcaggcagacaagtgatactgatattgatttcaataaaagacgtgaatctccctacgtaagagtggccgaattagcaccgaagagaaaggctccaaagccaccagtaaatggcaatccggttacatccgggtcgttgcctagcgcggctgctaaaaatgtttcagaatcgccattggaatcgccgccaaagttagatagaaatggaaagacaatatatcagaagaataaaccaagacctccacctcctctgacgacagaactcggctctagacgttctgtgtcgtcattaagcggccaggatctgaacgaggtaaaggagtcaccggttcaatcgtttactcctgcttcaacacaagttatggttcctcaaccatataaaggtgctttggaaacgttgaaacctcgtaaatctagcgcagatttatcaatcagaccgcggatgtctttaagacaattcagcaggtcaaattcctctctaaaccgaaaagtgctgtcaacttctcgacaaacactcaacaggaccaattctaaaccattagtcacctcatctacggctgcggatatctttgatgagaatgatatctcttttgctgatgcaccagagctttccgactcagacgactattctgcctcttctgacgaaataatatggtccagagataggaagtccatatcaaatgacgtacctgaatttagtttcaatactgaagataccattgatcttgtaggaactgatactacgcaagtgtctgtcggtgcaactgaaggttctgacacaccaaagaaaatggcattaagaccctctcctgatgttgtttatcagaacttggaaaaattctttccagatgctgatctagataatccaatccttgaaggattaacacccccaccttccccaaatgcagacagttcacctccaagccctagaggttttgaaaagtcattaaagacaaaatcagagcaacagccagcatttctttctagtcgtggtgaaagttctcagttcttgacccccgtcaaaagccttaaaccacctaagagaacaaagaccatcagaataattgcccaagaagcaagcgaggcgagaaaaaatgaggtgtctcagaaattgcaaagaaaaaatactaagatgtggggtaccaaagtcgtagaaataacggataaacgcacaatctcaattaacaaatccagaaactctaggggtgagtataaagagtttgcatggattaaaggtgaaattattggtaagggttctttcggtgcagtgtatctagctttgaacgttacaacaggagaaatgctcgcagtcaaacaagtgacagtacccgagtttagctctcaagatgaatcggcaataagtatggttgaagctttaaaatcagaagtatctactttaaaagacttaaatcacgtcaatattgtccaatatcttggttttgaagaaaaaaacgggatctatagtttgttcttggaatatgttgcaggtggctctgttgggtcgctgataagaatgtatggaaggtttgatgatcaactgataagacacctcactaaacaagttttggaaggattggcatatttgcattcaaaaggaatacttcatcgtgatatgaaagctgacaatttgctattagataatgacggtgtctgtaaaatcagtgattttggtatttcaaggaaatctaacaatatttattctaactcggatatgaccatgcgagggactgtgttttggatggcacctgaaatggtggacactgctcatggctacagtgcaaaggttgatatttggtccctaggatgtgtagttttggaaatgtttgctgggaaaaggccttggtctaattttgaagtagtcgctgctatgttccaaattggtaaatccaaaacagcaccaccaataccagatgatacgaaagatttagtttcacctgcagggcagagtttcttggatcagtgctttgaaatagatccagaaatgagaccaactgcagattctctagtgggccatccgttctgtaaaacaagttcgtctttcgatttccctaaaactaaattggcacaatttatcaaatcaaatgataagttgaacagcagtaggctgcgcataagctcgcaagagctgtagagcatgatcttttttaaatgatatataacgttaaatcactaacaaataatgctgatcaaaaaggactgaacttaatatttataacccaaagtgtactttacaaactaaattcaaaaaaataagctggtgcatctctcaaatacaatatcataatgatgttccatataccgctacatattgtacataaatcattcaacttcaggagtgttcatcaactcatcaatttcgatttctgctaaaagggaatctaatgttgcgtttatcatttcaataattttgtaagataaatacaaaggctgtctgagaggataccttaatggggaatcttctgagatccaaaacaaatgctggttcggttgcgatggtttactttccaaacgcaagtattgtacccattctgtgtacgtaaattcgtatgcttgatcttgatgtgataattgatcgatgtcttccaaatcatcaagcaattctttgatttctgctatcttcgagaaccttgtttccttacgtacactggttacaagagatggcagtgatttacatttgaggagcaaggtcttgctacctcgtctccttagttttgagctcgataaagaacagatgttgtcactaataactctctgttcataattttcaaattcctgttcatcaggtaatgtttcagattctgcagtttggtcaacggtagccatcgaggaagtcttgacaacaaactgttctcgtactttaccaacacaatattttgccattctatatagatttccaaggtggaaatactctagaatattgttatcaattgattttgatatctcatatatccagtcaccaacagttgatattaaaaccgtcattagaggtacagcgcctaaacaccaaatcacataaaatgctctcccacatccagatactggagagggcacaccgtatccaatagttagaaccgacaagagacagaagtaaaatgcctcgaaataggtccatgattcggagaaatataggactaaggctcctaacatgaggaataaagcgaaaagtgtaattgtcagaataattgaatttcgccgctgcaacattttggagcgttttctaatcgactgaatagtctcgtaagcatcatggtctgtaaattccaaagctgggtttgctaagtatttttgatagactttttctctttgaatttctacgctatagaagaagaatattggccctgatgaacttttcatggtgccactaatcatcacaacaatcaaaccaagaacaattaacccaaccaatgaatatattaagatcattacttctgaggctgtgttatctggaaatatgtcacctagtccaatggtcaacactgagacgacacagaaatacaaacttgcaccataagtttgaccgagcaattgagagaacatggcagcaccccataaaaaccatatagcaaacacaaaagtaaatttcatgagcaaccgttcattgtccaagagattgaaagtggcgggatatttttttttgtaatatccggatacatgtatcgattgaagtatcaagcataacaagtacaagcaagccgttatcacggcataccaataccctatagatctttgatagccatcttcaaagtaaatgagcgtggagatgagcaaagcaatcgttaaggttaattgagctataatccaacctgatatgcaaattatctgcgctttcacgtatgctagctttccagtgaagtttaaaaggagcacgaaatttgctataacaccactcactagggaaataatgttgagaactctaattcctggagggtcagaaacctggtgtccggtatgtggatcaattctccaatgatctactgcacatgccacggatatcatattggaaagcggtcctaaacatgctgtcactactgggaaatagcatgacactgcgaaccacacgataaaccatttagatgagggatctatagataaaatttcgagcctttcagctttgaaaccgacagattcagtcaaggctcgagttgataattcaaaattcgtagaaaaattccgagctgatgcatttctgctcctcgggatatgcataaatgcttataatttcaaatccgtaatgaaataaactttacctctagttatacccaacatatatcaaggtgtatcacaaacactgattacagaatcgtaactcggaatagcatcccattccagcttatcttactcgtaaatttacatagtttaactacatcatcgaacttcattaaggaatttagtagaatttaatgtaggatacttcaaaattgctgtgatgcatgggtgtgttgaagctggcaacgttaaagaaccatcgaattcgaaacgtaaataaagatcatcaagcaggaaaagtgacgcgtccgctgacgagacgactgaattgaaacattgaaggtagaaagagagcatctcttttaggtgtttgaccggtcgtaataggtggcttcattcaccaactgagaagaaaagagagaaactggtgactttgaatagaataaaagtttaattgcaaaggctcctctttatcagcatgtcattagctgcttcagatgtgtacctgtcgaatctcaacgatgcacaacgaaaggctgtcatatatgattatactaaagctcttcagattatagctggcccgggtactggtaagacgaaagtccttacagcacgatttgcataccttgtgctgagccagaagataaatgctgaagaaattatcatgactacttttacaagaaaggcggcggaagaaatgaaagagagattggtacctgtattggtttcaaacggaatatcacctcatggtttgaagataggaacattccatagtatatgctggaaattattgaaagaaaagggattcctaataggcaaagaaaagatagagagagcgacaacagagaaaattaagagtatattggaagagctaatagttgaaatgcctgatcaaataagagattatgcctgtaccaagtcatataagaatgaagttagtctatgcaggttgaaaaataatcaatggcaagtgcatccggatatgatactgaagcggattagtgagttgaaggctgacgcgataactccagagaaatatgaacaacaagcgattttcgatgaagcacttctacatttttatcagcaatatcaagcaaaactttccaaggaacatcttatagactttgacgatgtaatgttatactcgtttgaacttttatcgaaacatagagtgtggaaaaacatcaagcatgttcttgttgatgagtttcaagatacaaatttattacagatacatctaatattccagttcgcgagaggatcacatcatagctgtgaaggtgttactgttgtaggtgatcccgatcaaggtatatatgggttccgttcagcgctttcacataattttcaaacaatgatagaactttgtccaattgaatacgatcaaattgtgttgaaagaaaactatcgttccgcacaagcaattcttgatatctcggaaacagttattaagcagcaaaaaagtggtagggataacagagaaccacttcgagcgcagtttgttacggacaataaacctgtttacatgtcctttccctccgatgatacggaggcttacactatcacaaaagagattttatatctgaaggctattccaggtttgttcaagtacaaagattttgcaatattggtacgacttaaaagaagtttaaggacattcgaaaatgcattgattgctcacaagataccatatgtgattcagaaagggtacacgttttgggaactcaaggaatgcaaggcaatcattagatacatgagtatgatatgcaatgatgacgactgggaatccttaaagagaactatcaactatccaaacagaggtgttggtgaaactactgttgggaaaattgccgccgcttttgagaaggaatcaacagctgaaaagaatgaaaccgcttttagttttcttcaaaagattgcacgagattcagtgaagataaatattagtaacagctctatgattggtataaaagattacgttaatataatagaacaggtcagaaagtttttctcggagatatattccgatgccggtaagagtactattgctgacgccttcgaaaagttttacgttttaactggcttaagaggacaatacaaacctgaaaagaaatcaggctcgatagcttcagatgaccaaagtactgaaaaagaggcgcatcgccatttgaacgttctcaacgtcaagaattatttcagtaccttcaagattcccttgggtgatggtgatggggaaccgagaattgttgatttaattgggttttgccacgaattcgtcagcttcacagacttatacacattcaacgaggacaatgacaacgatgtcaaggatgatcatgaaacgaaagatgccgtggtcttatcgactattcatgcttccaaagggcttgaatggccagtggtttttgttccacaatgtgtagaggggttacttccaagttattataaagattcaagtgatatgccagcacctgatgaagacagcgatgaaaatatggctgtcggagatgcatacaatgaacctactgattcacaggatgacaatcgagatgggaagaatccaagctcacctacgaagaagaaatccaggactagtttcagtgaagagaggcggatgttttttgtggcattaactagagcaaaataccttctatatatcacaactgttgaaaaggaggctacgagcttcaaaagcagatttttgaagaacgaagttattgaactttgtgatgacaccttgaagtgttttgagagcatcgaacatttattcaaattgtattacacactgaaagttcagattcctaatcaagatcggatttcgtatgaccaattgatcaaggattattacaactatgggttcaacagtcgtcagctactattttggaaagacaacaagtattcacacgttgatcttccaaacatgacagaaaatacaatcggaatagttacgaaaaagaacgaaattgagtcagaactatgttctgcattacctagagtcaataaaactaacaccactcggaagacagttcatgtaagaccgggtgaactcatcataaaacaggaaagaggaacgcctccattatttaacagcccatcaaaactaagcccgaccccaaacatgtcccccactaagatgcctcccttaacaagggaagaaactagagagctggatgtacttctaagtgataacgaatttctgcctgaagctccttcccaagctcctccaataaaaagcgaatcggactacactgcggcggagattttacacaataaagatgagtcgataattgataatcgcccaattctcacaagtgccagaattcttgcatccgcaattaaacaggaactttcacaatctatccccaatattgatgcaccttccaccgaaacaccctctatcaaagaagaaaacgacactgctttcaaaggaaatgtccctaaaaaaccatcgacaaaatcaaataaaaagagggaacgtagacaacggaaagagcaacatcatcccagaccacagagctcttcagggtctgtcaagaaaacgaacaagatactttcaagaaaggtgaaattggaacctaaatccactaatgatattttactgaagctcgagaaagctaaacaacggaaagaagaatgggatggcgaaattatagacttgaggtcatcccaataataccattagataactagatacccgtaattatatagcatcttaaattcactcctcgtggattgacagataaaatttctacgttttgacacatttgacgcgtgttgatcttcattcgcgttctgatattattcaaaaagaaaccgtccctgataaaatgtaaacataaaagatatgcagttgaagtatctgttctctgacagataatcaaaggacacacatagattagttagacagtggtattcccccttacagtatacccatactgttgatttctgattccactttcgaagaattagaacaacatataatatctatctattcagtgttttgattgactgaagtaaaatggaggagctaacaaatggacttaacgaaaggcagcgacaagctgttacgcatagagaggatgacgtattacaggttttagcaggacctggtactgggaaaacaaaagttctgacagctcgttttgcttacctagttatagagaagaacatccatccattgagaataataatgacaacatttaccaggaaagcagcaaacgaaatcaaagagagactccagcccatcctctctcaggctggcatatcatccaatgggttattgattggtactttccattctatatgtgctagattgcttcgacaagcaggacatctaataggtatacccaagaattggtcaatcgccaagaccgaagatattaatacaatattaaagacattattagaggacacgccagttgaaattattcaatcgtcaacattcacgactgaattaagtgagaataggacaaatgtgagatttttgcggacaaagatctcagatttgaaagccaaaggtgtgacaccacaagcctacctgaaagaccagtcgcatgacagcgccatacagtacatatatgaacgatttcaagacactctcctttcagaagctctcttagattttgatgatattctcttgtattcaaagatcttgttgatgcaacgtagaatatggtcgttcgtgagacatgttctagttgatgaataccaagatacaaatgagctacagttagatttgatctatctcttagcaaggggaaagcatgataaatgtagcggaattacagtggtaggggacccagatcagtccatatatgcattccgatttgcctcttcagataatttcaataagctcattgaaagatgtccggttcagtctgctcagatatcgttaattgataattatcgatctgcacaaacgttgctagatttctcggagaaagtgattggccagcaaataaaaaataggatcaaaagggacccattgagagctcagttcaatcataacgtgaaaccattttactcatatttccagcggacggacacattcgaaaattctgagtccaattcccttgcccatgaaatattgtatttgaaatcacttcctggtttgttcaaattctctgatgttgcaatattgctgcgaacgagacgacaagtgtatgacatagaaaaagccctcatcaaaaatcgtattccctatcgaattgttaatgcaaagggagtttgggagaaaaaagagtctggtatctttctcgactacttgcgtattatttcccaggattcttgttcattagcaatccttagatgcttacaatttgcttccaatggcattgggtcaactactattagaaagatcaaatctgcttttgacaaagatcgctgcagaaattcactcgaggtcttgaaggagctttgtgagtctaacgacttaaacaaccaaaaaatctcagcagctttgaaacgttttattaatcttgtcgaaaaactaaagttaaagtgtgaagaatacgacacttacgatggattaaaggaactgtttgctgagatatatatgctaggcgagctatattcagtcctgaaaatctctaaagaaacaatcaatgaacagattaaagacaggtctttgaaggaatttcttcaaaccgaacatcaaaatatgtttaaggtatatgaactgtttacggagtacgaactagatcaaaacgacgaacatataatgattcaggaaaatgctgctgatcccaatgatttagctctgataaaggagaattttaactctaatgacctcaatttctttgaagttattactttctttaccaaatccatttcattatattcatctgaagaagagaacaccgaaaattctttagacaaattagcaaatcatctgcaagaacgagtaacagtatctaccattcatgctgccaagggtttggagtggccagttgtattcatcccttccataaacgagggattgattccttttacagagcagtcagctcgccaaaggctagaagatttggcagaattacgtcgggatggtgaagcatgcaatgatcttaataactgttcgatgggctcaggtgaattcgacaatattaaagaagagctacgaggcaaggaatcagacctcatagatgatttagagactaccttgaacgaagaaagaaggatcttctttgttgctctaaccagagcgaaggatcttttgtatttgtcttcttcaggcaaaaaaagcatcttcttaaagaactgtgaacaactctattcgaataatgtcttgttcaataacccacaatcaattttaaggttttaccgttgcatgaatcggacattggaagaaacctcctcaaagttttcattgaagtccctctgccaagactaccaaaagtccaaaaattgcaaaaccagcacttttatatggaatggtacaaatgttcaaacacctgctttaatcgatttcaataacaatactgctccctcaagtttttccacaggaaccaatagtttcaaacctgcaagttcctttttgaacgcatcattctcgccaggtaaaaacagctacaattctgggactgcaaatgttaccaaagtcctcacaacctcatctaaagaatgtccaaaacctgctggagggaaaatctgcgagaaaaagaggaggatcaccctggatatgctgtgcaagaagcctgtcaaaaatagccaaagcatgcaatcaaagaaaatcagattggaaagctcctccgctcaagacttgtcgcactctatatcttcagataaaagaactaaccactcaaccaaagtggcagtaagtcaaagcaaatcttttgctccagcgtacactcctgtcaggaacaacgcgaaacgagtgaaactcaaaacgagtactactgcaaatgcctacatttcaaagtaaaagtgttttaaatgtatatttatctaatgtctttgatgatgatctgcgatttaattacctacacagaggtcaatacagagtttcttaaaatttaagcttaaacggaacttttagagcgaatacggcgaggaacaaagcatacactgtcagtatcgccatcgccttataaggtggtgaatccaatgtgttgaaagtgaagttaaccatccctgttgtgacatttgatataagaaataccagcatgccgttaccgtttacagctcgatacgtcttaggcactctaggtttgctcgttaagcattcgactatcagttgatcgaaggttaagattaacagattgaatgaaataaccatagaggagtacccaattgaggcaaatctccgagatacctgtaatggatgatagtgtagaagaacatacgatatggcagaactgaagatgcttagagctaccaatttccacagcagttgcattggatttctggagattgggaagaacatactaccaacttgctggccagctaggtagatgatacaataaccaacaaacgaaaagattccttctctattcgcagaaataaaatctattcgttctgcatttaacaaatagtccagaaaggttggatggtatatcaggcaaagctcgtagataatggctgcaatcaaacctataacaaatctcaatctcatgttgtagaaatcgaaaataatcattgcaaggggtagtaatgaaagggtaaagaagaagttccaatggataccatattcggttgcatgttcttgatagtttacagccttaacggaaaacaaacgaatgaaacccaataccactagtaccaccgtcgaccttaatgattgtttaattttagcccatttggataattcagttccagattttaatcttttgtaacttataataccattgctgaatacaaacgatccaacacctagatccatcaatgaaatgccccaggtttctaccttggcatatttcctaggaaagatagggaaatctacagccaatatggcaatggaagttaagatcagcattgtactcctatacactgtgagggttgctgactggttgccattgtccattacagtttctttaatcgtttcgcgtttacttcccttagatatacatccaaataatagcaccgcacttaaacctaatatacctgtaagaaatgggttttccccaaatacagtaacactacagaggagacccatccaattcaataagaaatctaaccagaaggagtcccggtagctgggattgttcgaaacgacgtagatccaagcggcgttagaaaaaataccggctaatgtgacatctcgtaaatctgcaattgaacttccggagtgtccggtaacgaaagcttccttccggtgtttcaattcatcaattacaccagaagcatccatggtctgatatccccgagcctgtatacgtttcttgtacttacttcctttattgaaccttcattgatctagagcttaataaacaggtagaatgacacttgtcaatattttcacttttaaaggaagcatgcacagaagagtaaatctggaatataggttcagacacgtaaaaatgacacacatttaggagttagaggcacttctaagcagaataagaatgttaatgatcttgttacagataatatccgaatggatatgtatacatatatacatacatatatatggcgtgacgtaataatacatgagatttatgaaacatgagaaatgatgtctttagcttggcttctggtagaaatcttccttcttttcaaattctgctgcacagatgtcgacgttgatgctgatccgtacgtgatctgagtatgcgaaagatggtcactatcatgacctacagtttggataaagcttgattcctcattctctgtatctacattatttgaaagaagtttcccccaacggttccctctatttggaacatgaggtagttctgctgatgcagaagaggcagttgacagaggtgccgcaatatcaacaggagcgggtttctctagcaaaggatcctcgtttcctctttcctttggaattatttgtagtgcaaagtcagatttagaacccttgggacaagaaatacaccaattaacgtcattaaagtagatgttcatggaagtcttattaggtttcattgctctttggaagagttcaatgacaaaacttggagttaggatgggaatatgatgagcttgcttaacgaattcaattttccgtttcattgaatttctaaacatttgagcttgatttacagagatcttcatatccaaatctgtcctgaacattgacgcgtacttattttgccttaaagtatgttcctgtggtattgaagtcaattgggagatgttaacgagtaagaaatccgtcttcttcgtcaatttctcatgatggtcaaaaccaatcaacttcaaaaagtctataattttattgatgtgtagtaattccacgccatggaaccctgtgatatggaaggaaagtttagggccatgtaacaccgatttaggtggaatgatattgaaatcgttgtagaaaggttttgaccaaaaatccggaggtaggagttgttcgtaatacaaacatcgttcgatgaagaattctgtcaaccacgatgattcatttgggattctcggcagtagatttgccggaaatccacttggacagatataataaatggtcttatccttcagctgtgccggtgacggtgatgtatcctcgaagagggaagacgttcctttattaccgcgaatgacattagataagatagtaacctgtcttttttcgaacttgaatagcacgaagtgacagtccaggaaggtcggtgtatcctttgtctcaccaaggcattcttgatgcgttggggtggcttccttaatatcagtggactttgacgctgaagcatcaccatctcttgccaatagtttcccccatatctgattcgcttgaggcttaaatttatctatagcaatcttcaacggattcaccgaatcatcttgtacacccatgggatttggttcagttacagattttttcttatctggaacgtcacgaatgtacgaaccagaaccaatgtcagagtattcaagttcatgacaatttttcaacaggtagaaagattgaaagtctagagtccctgatctgtccatacaatcaatgatccattttggatgcactacgggaacgttctcttctaaagcagcctggacacggttccccgataaatcatcggtaataaacaacgaaatgcatgcattggatgacgaagagttcctaatgaaatgcgtggtatctaccgatttcactttacccaatttacacaactgaaccaacgactcaagagaataatggttattaggtcgtattctgccaatgaacaagttaaatttttcaaacgacccgatagagtacttcgattttaagtactgggacatatcgaatttagccaactgcaacagatcttctcctgcgagccacgcatcgtacaactgatcaacggatcccggactaacaaacacgatatcagttctattcttgacagcaaagttatactttgcggtgaataactctccaacaaccaatacgttgactagtcttgtcaaatccttggtataagtcccaccgagttttgtcactttatgtgagatggtatcagaaaccgacaacgggagagacgtaggacagaacaccagtccttgaaatggtttgccggacatgtttgctctacttcagggagaattgaggaagaagaagaagaagaagaagaagctatctacacctttgttccagctttttagacacatcatcaccattcatatgtgaaggaaggaaggatggattggatatctgtgtaaatacgcgtttatgtgtggaaaataataaacagagaagagttgtaaaatgacatttgtttacaggtcacgtggacgaaaaacacaagctacccagggttaccctgagaaaacgaaaaccaaaaccaaaaattaaacactaaccacgtgactacagcgaatctcccccttccggcgccccccccgtcgagtcatcatccttgtcagcaaccgtccagctgactcatatatctgtcacatgtgaaattgcaagaagcaggcaaacatcgccacccatacaccattcggacttgtgacttctccccgttagcctttcatccggacaaatcctttcaggtccttactctccctacgataaaccgatataactgcacaaatttttttgctgactacacggaaaaccgcgcctagaaccgctttttttgtccccaaaacttcctttccccagatccggctgaaagggacaattgcaaaactggaattacacactactaacgcatattaattagccctcttatatagtctatagcataccgaatactgaataatatgtccaacgtcacttgtggaaatgtcacaaatgtcagtttctgggatccatcaattaagggaaattcttcaaacgtcccagctatctcggttatctcattggtttattctcttggcttgttaaaaggtagtttcttcttgccttagtttcttgaattagatttctcgagggtttttatagccaaatattattattattattcatgattctgaatcagatatataagacaaacggacctggggaaacgttctgccatataaccatgaaccggaaggtttatggtaggtatcagatgtttttttttctgtttggaacgtaagcttgctataagcttcctgtagtagcgccaagtatatgtatatatcactatgccaagtgtttcgcaggatgatgtaaagggcgtgcttgctggtaagatgtctactggtaatagcagtgatgacagtagcagtcagtcaggtaagaagcgtaaatatgggaaagtcgacaaacacaatgagaagaaattgttgatgcctacggcatcaacaaaagtgaaacggttttcacaggcatgtgatagatgtaggcttaagaagattaaatgtgacggtatcaagcctagttgttccaattgtaagaagatagggtaccattgttcgactagtgataagcttacaagacgcgggttccctaggggttacacggagatgttggagaacgaggtgattaagttgcagcggctttgtgggatggtggacgagaacggtgagaccgtgattgatggtgcagtagctgccgtggcagctactgcacagacgggtgttattcctgctggccaggaattccttaactctgtgggggaaatgggaacaaagtcttctgtttcggttcctccagcggcatcggcagcgccagtaccggcccaggcccctgcgtccacgttcctaccctttatcaatgatactttccataaattcccaaactatatccatgaccaagtgtatctaggtaatttcacctggaattcgatcgtcaaccataataaatctcagttgaagtctttccagtatacaaggtctatcgtacaggacccggttctatcgtaccttaaccgacatttcccactttcaccgagcggtgtaccgattaatatccccttatctgctgaggatgtaatacgattaattgataagtacttgaactcgaaccaaatcttcccatatctcttggggacgtcatggcaccaacgaatgatctcggtactaaccgggacttcgactgtctctgaccctgcggtgtccattgtactaatacttatagtacagttcgagttgaattgtttcaataacgagacgattttccaggcggttaaacttttgggttccttgtcgcaggacaaattatcatcgattcaactgatgaatttcggaatacggtatttcatgtcccaggagaacccatactctgtcatttggactaacgatttgattaatttcaaccagtatatgatcatcaattcagctttgttcttgaattacaacaatcttgttggacatgaaaactcaacgtcaaaggttattaggcttctcacgttttatcaattccaagtgttccagatctggtggtgtttcatcaacggattacctaagactaatttcttaatcgatgaattccatccaccaaccatttcagagttcccacctcatttgaagatgttccaactcatttatgatttcatattgcaattggatggttgtcaccttcaattattagctaatgagactaacaataaatatcagctgttgatagaatccttcggttacaaattaatttaccaatggaaactttatcaccatttacaagaccatgatttcaaacaaattcaattggaaaacaacgacttacttgaaatcggtatcactttggtatacctcgtatgccgatatttacaacaaccgaattccgtggaactatcttatgaaatcatatcactttattggttaatcctatccgataattcaaacgtgaaaccaataaattcgagaatcttgaagactgttcagtttatgcctttgaacaataaacaattgatagagaactgtttgttgaacttattgaatgaaccaaaggaaacgttcaactggtacaaatacaagaagttgttgaaacgatgggtcaccatttggatggatgataacgacattttctcaaggttaatctctcactaccaactctccatcggcatgtcagatatttcaccaaccatttcgaatttcaaaccaatggggatggtacctgataccgttaacgacacaactaatttattcaagatatatgacgatgccaatgataacataattgatgacgaaggctacgaagaagataacgaaagtgactacaacgaattgataatattgcccaagaggcgaagcatgggtcaccatccatctgcaagagcgtccagcatccataaagccggagatcgaactgatttttcacttttcaacaataagatcgaccacatcataatcaaggagtagctactcaaatcaaacagaaaaattcagacagaagaatcaacatccgcaatatccataactatttattactgattactactaagtgtcatctcctcttcagtcctttcatgataattattactatatttattctgttcactagacactattctttacttctcccattaaatatacttataatgttttatcagttaatattcatatataccattaaaatacaaggtgaaaagcataacaaagggaatagaaaaagagacagaacaatacataacaagacagagaggtatatagagattatttccgttccacccaatactgctgtctcatcatggtaaagatcaagttgcctgatttagagagcgatgaagacgtagatctgataggaacctcgatcaacaaagctgcaacatcaatctctgacgaagagaccgaggagcagctggccaaaccgttaaagttcaagttgaaaagaaacaaacaggtaccactagtagaggaatataccaatgatgatgattactccacgttgtttgagcaacccgccggaacaaaaccccgtaatacaaaggaaacgattaacgtattgaatttagaagatttagaaggttcagaggaagaacaaaatgaaccacctaagtacaccaagaaagtacaaaaccgcagccagctagtttcagagaagaaagttaacgaaaagacgtacgtgaagttgctcagcaatcaggataaagacgatttacgtgaattgggaataaccgcccaggctgatatttacgctgaagaagacgatcaactattgatggataactcactgcaagacgaacggttagcattgggagacaaagaaaaacagctgatgcaacaacggaaacgtaaagagattgaacaattgataagtttgcatgatgaagagaccgttttaccacaggaaatacaagaacttgataaaataagcggtcaaaagacagttcttctacccagattgcaacccgagcaaaaatgggaagatatatatcaagagttgagcgaatacgctgcttctcaacgtgacagagacactctaagctccaagagaatcgaaatattatcacagcaattgcaagatttgacgttgaagaaggaaacctttctagaagagatgaaacagatagcatcgtcacataacaacaaacatcccacgtgaccaaacacgaatcacgtgatgctaaattgtgactcaccatataaggtatgacgcatagtttgggaaagagcccattcgtacagaatgactgcatggtatataacgaacagcacgaaaacggcaatttctcattcagaacagaaaaaagttaataaaaaaagacagtttgaccaattcttaccgttaagtacaactgataacgaactaacagttttagattctacaaaacttgcaagtatctacacgcatttgacagctgctttcacctcaaccgactgatttttaggtacccgaaggctgcatacagaattttttactccagatttactagctatgactataatgagcgctgcttcttcctcttcttctggtgatattcgtcatttgatttcgatcaaggatttgagcgatgatgagttcaagagcttggtcgatagagccgagtattacaagaaggtgttcaagagtaatgatatttcagaattccaaaaacaacatttgaagttgttgggtaagaccatcgctttaattttcaccaagagatctactagaaccagaatttccacagaaggtgcggccgcattcttcggtggtcaaccaatgttcttggggaaagatgatatccaattaggtgttaatgaatcattctatgatacaactaaggttgtgtcttccatggtttcatgtatctttgcccgtgtcaatagacatgctgacattttgaacttggccaaggattcttctgtgccaattatcaatgctctttgtgacaagttccatcctttgcaggccatttgtgatatgttgaccattaaggaacatttggactacgataacaataaattgaagatggcttgggttggtgatgccaacaatgtgattaacgatatggctattgctgctttgaaactggggatcgatgtcgccgtagccactcctccaggtattgaattggacagcgacatccaacaagagggtcaaaaattagctgctcagaacaactgtgagtttgtctgcactcatgattcgatggctgcttgtacagacgctaatatcttggtgacagacacttttgtttccatgggtgaagaattcgctaaggaagctaaattaagacaatttgctgggttccaaattaattcagaactatgttctgttgctgcaccaaactataaattcatgcattgtttaccaagacaccaggaagaagttacggaagaagtcttctacggtaaaaactccattgttttcgaagaagcagaaaatagactatatgcagccatggccgctattgacatatttgtgaaccacaagggtgacttcttctcacatccataatttcattcggatagaagtacctcctttcccatcgtttctccatcaatgtttatatttgggaaacgttaatgatatatactctcttatataaatcggttgtatcccggtagcttggaagttacctgcatagtcatattataatgttataaattaatacagactttcccgctaaactgaaggttgtcagttgtccctagactgatcatacctgtatcagtatccgattcttgtataccgaactcatacacttctttagccaattcaccagaatacttcgctgttttctcattggaaaacaatgcaagtgttatgtgaggaactttgttaaggcaagtcaaatggtccaaatgagtaccatctggcataacaattggatgggtatcatctagcagggaaacggtagctagaattacgtgcttatcccagattaaatctctcaatttgaaagagacactatcctccgtagcgataatgtttttggtagcctctgagttattttcttttgagagatactctttgtatctatccaagtatttggcccacatttgtttagcttttataccaacagacctgatttgagacttatggtatagggttatatgcaaagcgtctttgaaaggagttgaatccagacttttaagcaaagaagggtactctgatgcatgtgtttcaatggtttttctgacatgttgcaataaaaggtctgtgtcaattacattagctgagaaatatacaggtttatgctgctttttgtcaattttattcccacctttaatgattttcgttatggttggtttgtaattgagagccctttcaaaagcctgatgtacgatagaatcatctgggatcgagggaataacgtctccataattacgctgtaactctttgagaacggtaatagtgtttttcaacgacgagttcttgccaacttccaattgtatatggaagtcaaatttgttatcaggatctttggaaggaaggaatggttggaatctgttcatgaatccttgcataattttcaaaaccttctgctgatcgtcactttcagatttgatgctttgatgattgtcacctcttttcataaccctgtcgatggttaatgctctcatttctggggatacctcgtctacaaaacacaatgctatgacttgtaaattacagttgtatggaatatacgaatccctatattgattgatccattcaaaaacagctgccctttcacggaactgatgattgtttttatcagcaagcacaaattgtttcccgtctttgaataattgcaaggctgatttaatgtagtctgttttattagaggttatattgtcgttcacaactagtccccatgactcagggaataactcattaagcgtgagagaaactgtagatttaccacatccgattgtagcaattgtcactagtaaaaattttgtattttcatcgattacattttcgacatgattttctgcctcttctaattctttaatcttgtccaaattgaggatctctaggcctgacataccgtaatcttctagaaagagttttctcaattttattatacccttcccgttcatgaaatcatcagctagttttgggtcacgatccaacaagggaatcacaaagtccatatatttgttggtgatatagttatgcgagcggtatctgaagacacgttgtttggtagatatgtactctcttgtaacctccctccattgtcgatacatcaaataaggttctttaaacttgtacttgaaaaagaatgtcccaccagttgatttatccttacatcttatcacaaacccttcaatctcttgattattgtaatgaccagctttttcgcactcagtaaggaatgtcttcaatgatgaactatcttccgtagtaaagtaatcaatatgcttaaatccccatgcgtttgcaaattcagctacttttgccattggaaaagtgctgaaccctacagtattgtagtttaaaccatgtaggtatagacctgcattgtctctgttatattccaaaatatgttcttcaaaggtatcatcgcaatattctgcaatagcagtacaattggcttcatataaataccgtccaagatccttcaatccaaggtttttctccttcaattgttgttccaagaactgctgaccagcttgtgaatggtttctgttgatgtcatctctgggcccagtgctatgtttcgaacatactacaacagtaccatcttccaatcctccaatcaaaattatacatccgttctctttgacagtaatctcatatggcccctcagtgttatcttgaattgacctccagctagttctttgcacttcgtcgatgttaaagaacttatcgtatcctctagtaactatcctgggctctgaatcagcattttggataaataaacctctggcactacaaggtaacactcttttagatttgccatagtcccattcattgaatttccaactgtccaacttcacatcgggtctatcaaatatagaacatgtgatcttagtagctttaccatgcttcttcaaatgagaagcttcttcgagtcttttcacaagctctgtcacatcttgttctgccatttttgaagccaaataataaagctaatgctttcaggcttcctgctagaaatctcgtcgaacagcttggtcgatatgaatgagaagtggacagatttaagcgaaatttcatcgatatatcataactcatcttgtcaagtgaaatctcgatttcaatcttcgaaatcgagctacgttacccggaattggtgaacctgttgaagttcactggatctttataaggtgaagcctagcttctctgtaaatgtatgtaaataagataaaacgaagtattgtgaagggcaagcactgtgggaaagaacgatcctggtcatagcaaattagcgtatatcatcaattcagtttacttctcctcaatttacccagagctagctaaaaaatagcaaaagttttacactattttgcattgaataaaaccaatagggtttgtgcgaaagagaaaggaagccaaacgggaaaacaggaaaggaaaggaacaataatgtcttctattgatataaatgaagcagacgttattgtcctttcagaaggtcttaagaaattagactcgttgtatagtgagatgagtcaatcattgaagaagatcagttctactacctcaactgcttctcaattatttacacctatactcaagaagaaccaacaattgaatattctacaatacaatatagagtccagtttgaattccgtagcttcagtgaaggatctcgccaacgatgcttccaagcatgagattattttggaacaatcaattgcaaaagttggtttgaaaccttatatcaatgcgatccacaagatagacgatatcttggaagacctcaatgagagaacacactcaaatgatacttctgaatttgcaggtatggttacacatctgaaagaattgattttcgatggtgagaggaatttacagatctatttcaacaaattactgaactcgatccagccattcgatccgcaaattaatatgaataaaaaaataccattcccatactatgatgacgaatatttgggacaaatgtcgcttatattggattatttcgagaattcaactcaaaacgcacaaatagtggatctttttatcaaacagcgggtccgtttgatatcacaatcattggctttcttagaacctttcacgaaacaaatatcatctggacctaatgtaccataccaaaaggggagtagtggtgtaaacagttacaccgaggcgatgctaggcttcattgctaacgaaaactctttgattcaagatttatattctaaagaaacttcaaggcaacctgtgatatatgccaaactttgttcccccatcattcaaaattacttgaagatcataaggcacaatagacaactattgaaggataatagagaaaacatagggttgttctcatttgaattgagtgacaaagtcaacgatgttctacgatctctaagaggtaaagatattgccgaagcggattatttgaatagtgagttgatagaaattcaaaggatatcacattcgttatttcaagagttattcgcatatattaatacaaaaacgcgcagcatgtctcaattaccatctgataatggtgtccctgaaccaactgtggatataatgtcgaaaataagaaagtttagtgaatataagtcagggtgcctgtctaccatccaggccatgtcacgttcgcagtggttaccaaaggatccaaaaatttcttggacaattaccaaaaaccaactggaagatctttcaagtgctaatcttttatcttccttctttggtgacgccattgactatctcttattcggacttgaacgtagagctcaagaaactttgaacccacaacatgaaatacatttattgtcaaataaaaggttccctaatatccaaagaatcgggtttttccttttgaataacctaagcttgatcgatcagattgttcaaaggtctgaaataaactctatcctaggaagtgctgggctagcacgacttgaaagtttaagaaaaaaatacattaattactatgtctcggattggagagatctcacctctattcttttggatcaaatatttgttgatagctctggtaaagtttcatcaaaagaaaaggatcaaatcaaagaaaagttcaagaagtttcatgatggattcgaagacttggtatccagatcaaaatcgtaccgtatttctgatccagctctaaaaaaaatattgagacaagagatcctttcgttggtactccctatgtatgaacgtttctacaaccgttataaggactcctttaaacatcccagaaaacacatcaaatatactccctctgagttgatgaacgttcttaatactatcattaaataagaactacatatttaataaatctttgtctatagaatctgatatgtttgttggttcaggagattcacgctgattatacctttctaggttattcttgaaatcctccaaagcatgattggactgcaaaacattcatcgaatatgattgtgaaagcaatggagacatcgctggttcactttgcagtgggtgccaagatgtgcgctctttgcctatcattgcagttaggtccatggacgctttactctcttggtcatcttccgttgttacttgacgaagtagaagcggctgagtggaaatcgaattagtgtgtgattgtgatggttccaacttctgaattgtgtctgcagatgaatgagaaaatacatcatcctgttcattaccttcgccagctccattactttcattaggcccatttctttcatcattaccagctgctgaaagaacgtgctccaagtcgttgaatgattcgcttgagtttttgatagtagatggtagagaatcaggaacgataatgctactgcgtctcctcccagaaacagatgatttacgagaaactgctgtcctatcattgtgtgagtgggatctcatcattgcagtcggaagatttaaagatccgctatcatttccattgaagtggaaccctgcagcaatgtcttcatctaccaaatctgtagtattggaaaggcatatttcaggaaccaccaccgatgaagcctcgctgctagcttttgactttgtcgtcttaccatcagttgcaactgactccgaatatgtaggtggatcgacaggtagagactctgctttaagagcttcttgaaatggtggaagctcatcgtccagagacactgcatctatggtttgattttgtgcgagcgatattggtttccaagtgggagatgaaattggagataaaggtaatgcctgaggtgaagccaattcagcatgaatatgctcaggctggtaaatattagaggataattctggagactgcaacactttattccttaaattcagttccgatattgataattcgctatggcttagatttctgtgctgcagtaaactcagactggttctgttgtgggccacaggacttaacgaaacaggtgataatccaattttctcatctaatggttgaacttccggagacataactggtgagttaatgacttgttttgggaaatatagattcgaatcatgatacatattaaaatcagaatcaccgaatggtacagagccactgtggggaatagcggcatgagtatcgtagcttggaagcaatgtatttgcgtgagaagaaagcttattcaagacatgaataggtgaatcaatacttatttcgaagtgttttttgacgccatcaacattcttcgacaatctcaaactaattttaatccaatgatttgatttgatggtcccatatgaagtgtccggatgaatcttttgttggtaattaagcctttctgggaaaaatacctgatatttgaagtccctagttaccaaatcaccatgttcatcttctaataaatttcccaaatatttagctttagtaggtaccgcatctggtggtaaatcttttatgggaggagctctatgctccgtgagtaggaattttttagttggttcaagcctgtgaactttcttgcctttacaatagtactctaatgtctcagtcaagaatattcttattctgtgtagcgcgactttatccataggcataattcgaaatgcaattggtagaaatgcatcaagcacaatgtctttggaaacaatcatgatatcataatgtaaatgagtattccagtctctggaaattgcaataggttcagtttcttctactgagttatcggatggtgtccttacaattgtaataggtagcttagcgtttacacctgacttgaaagcaccttgacgttcgatattcacaagcaaaaaatactcaacttgaccgaacgtagcagttatagtctctggatacgataatggaatagcatgctcaaaggaaaaaatataatcacctggatgaaatatgaagggaccaggagttgctgaagacgagtttccgttagacttcaccgatgaaatatcactaacagaattggaaatagaaagcatgtcgcaaaaggtttcagataccatcttgacatttggaatgtcctttgaagtagatcttaaaaaattccctattggagaaagagaccgcatctgtgcattactatgcctcctggccattggtttatccatatcatcgtgcaaaggcctgaataacgaagcgttactccctttcagtaaatcagcaggctctgttgactggttatttggaacactttgcaaatcgctttggaaaaaaggccacgtatgtttcacaacatcattgagctctacaaattcttgcttctttggtggaataccttcaggccattctgtctttgacgtacctttgaacgttaaattaatagatttcaattttgtagattttaagactcgaagaatcaacgatcctcttagtatagcaggtggtcttccctcccaatgagtcggactaaacccttgcaaaaagattataggctcagcaagttgaatgtatacttggaaagaacttgatttcgctaaaggagtagcgtccttcggtattcccaaatgaatatccgaaggaaacactggtgacattaccggactcaggtcaaaagacatcttttgatttcagttcagaaccagaaactacggtcagctattacctagggagttggaaagaaaatagagtctcccctttgagttgcgctttttcgaaaacaattgttcgatttaaactgaaaaaccctcgaaaagattagaataaacaagtaataaatttgaagatgactttcttctggcttaaatcctgtacctgcaacctgcaataaactagacaaccgtacttagacccttgaaactctgatggcacttaccaacgacctccctacagctgataaaaaggtatgttgccttttggagagcagacattcttgaaaggacatatttaagactgaaagcttttctttttgatattgaaaagcttaaattggaacctaggaaaaggaaccgattttgtgtagtatgccaaggaaaataacgaacagttatagagtcacagttgaaccaggttacggggttgatttcaatgcaaagaaggttcgactctatttctagttttcatctttaagtgctagttttgctcagtttaataacggttttcttttcatgaatgaacgacggaagattatcaagagaatactttgatttgattaaggatgcacttcaagaggaggaaaaaactggcggaagcggtagcagttcacctcgtaagagacgcaaattaaggtctttgcagaaggaaccagaattggaatcggagagcaatcgtgtcgttattaccatcgaatcggacgatgaagaacagaataactacgatgatgatgatgatgatgatgatgatgatgatgaatatgatagtgaagagttcgaagatgtcactgatgcgcctgctaacaatggaaatatatcaattactatagatacatcagctcagaaaaagtctacgaagaagaagaagaaaactgagcatgggttagaccctgcagtgaaagaatttcgtaaaacatgtcatatgttcatgctacttactctcgtgtgccactcatatcagaggaacgaatggtgtaacgacgagaagttgcagaaaaagcttgctaaactggtgtctgacgatatattcaataatctacatccccaaaaggatgatgagatgccattaagaagtacccggaagttgctcgatgcattacgtatgttgatgaaacattggaacaaaaagttcaaattagaactaacttcaccgtacgaattcaatcatttatatatggttcattgggattcggtgttgaagcacaagtgtgaaagtgtcacattcaaaacattcaaaaagtttttcacaaggatgcgtggaccagccaatattagtgtgcagggttttgtcaccatgctgagaggttgtggattgaacgcaagactcattcatagccttcaaccacccgatttcactgatagtaagatctacaataagcgagttgtttggagcttggaaaatgaatgcctaaagtatccgatattttggtgcgaagtatgggataaatttgcgaaacaatggatcactatcgatatcgttggtcaagaaataattgaacaagtgcgttataaatcaaaactagaaccaataggtcgtataaattcagccttcaatatgatgcgatatgtcatcgctttcgatagaaaacaaggctgcaaagatgtatctcggagatacatagcacatttacaaaataaagttcgaaaaaagaggattacaagagaagctaaactgaacgaatggtttaacagcattataaagtttttgaataaacgtaataggaacaggattgatgattatgaggatgaatattttgatttgcgtaatgaacacgagggaatcccagacagcctacaagacattaagaatcatccgttctacgtcttagagaaagatttgagagcaaaccaggtattgaaaccgggtgctcagcagtgcggcttccttcgacttcgtaataaatcaaactcccttctcaaagtttttccaaggaaagatgtaatatcttgttacagtgctaggcactggtacatgcaaggaagagcattgaagtcgggtgccaagcatcttttgacacacaaaataaagaatcctgtcgaagaagacgaagatgaagagaggctttaccccattggtcagactgagtatgttattcctaagcaagtggatgctgatggtaaaatccctactaatttctacggtaatattgacatttataaaccatggatgattccaatagggtgttgtctcgtagaaaatccaaactcgattaaagctgcaagcttcttacgtgttccatttgcaaaagcagtgacgggtttcaagttcgaatcgggacgaagagttaaacctaaggtcaccggcgttgttgtcgagaatgaatacgtcgacgcattggttgctgtaatagaaaatatcgaagaatgtaacgatgatgcagctagacatgaattagagcttgaggctttgaacggctggtcactccttcttaccaaactcaggatcaaaagtagattggttgaagaacatggtgcggtggcagatgaagacggcagagattactctggtgaaagagatagcgatctagaagatcacgaatcatatacgggagaagacacagaaatgggcggtttcgaacaaggtgggttccttcttgattctaatatggatggtggattcgtgcctgaaccagaattacaacatgcagaatctgaaacagaacaagttgaacatccacctgtgacctatggtgaagcaactctagaccgcgctgaaccaagtaacacggagccaaacgaaatcgctgatgagttcgaacagttcttgcaagaagttggatcgcaatcggatgacgatgattcatttcaatatgaatcagaataaatctcaagatcacgtgaactattagtgtagcgtatctaatgactatgtaataatatggaaacaatacataacataaaataagcatcatgatggaagttgatgtaccagtggatcaaaagcaatcatcgcacaagactgtattgttaaccgctgctacggtgcagtgagtatacattaatcgatattctatctaccagtactcctgctctcttcaaagatatagcaaaataatgagcttcttggctaagttacagcagttgaagcagaccactaagattaatgaaccgaatcattccgcaaaccaaaataaagctaaatctcttcaatctgaagaaaaactacttcccaaggattacgttcgtgaagttgacccggctattcaaagattaaaggaagcgcgtaggttgaagcaaggtatatcatccacatcgactaaacctgctgctaaggccaggcataaagcgtcatcgccgaaggatgaggctccaatttataagaaaaaacctggtgtcaataccacaagcggaaagtatcctgtcgtggtaccgaaaagggagccaatcaagaaactatcgtttgatgaattaatgaagcgagcagagcagaagtctagggaaggaccaaaggaagacaagaagccgctcccgaagaaactcggatttgataaagccgctaaaccaaaggcggcaacgaaagatgctaaacctgtaaaagaaccgaagtcgaaagtgatggtaaagtctttcaaccgttttgcacaaccaaacgaaaagcttgcgaagaagttaaaacttaaagaaaagaaacaaattatggcaagacacggagatcaacattatgacagtgagaatgacgaagatctctcagactttattgaagatgatgatttagacgagtgtgaacaaggctccaaatcacaaccgtacgatagagatgaaatttggtctatcttcaacaaaggtagtaaaaggaaatactttgattcagatgatgacgacgatatggaagctaacgaaatggagatctttgaagaagaggaaagagctacaaaaatggcgaagcttgaagataagagggagcaagcttggttaaaggaacacgaaaaaaggaaaaagaaactgaagaaaagccattcataaacatgtcaatgtacgaattgaatatatcatttattcatctaatatacaattaattaatgcattagttgaaatcatagatccaaatgaaatcaacattttgaagtttgtgtactattataaaattgctttacaatatcaactctataaatccataacatactgcaaagattatgataatgaagatcacaacaccagtaatataatgccaagtaggtgcaaacgtgaatcttgaaaacattaataacaaagaccatgcaccgagaattaaggatatggataatgatatgaatatcatcgtcaaaatagaagtttcgttttctagttgtgtatcatcgttgagtgatttgaacaaagatgtcatgataccaatggttacgcctgtagtcaaacaggatattagcaatgaagaaacatagaagaaagatatcacctggtcatgctcgaactcatatattgattctgaattttgttcttcgagttcccaaaacttattcacgtcgtttctttccgaagaagaagaagtaagtatggaagtgtcagtgtctattgagttgtaggacttacctgcatctcttaataaagatttcctagcttggacgtcgtcaattataccgaatgcaatttggaacttcgataagagatgatagatggcaattatgaatgatgggttaaatctgatgagaccagtatcgtgtgtgtattcgtcatcgtcttcgtcaagacaggaataaaagtcctgatccattgcctcttctccgtcatcaaattcattccagtaacgaattctaggcttttcacgttctgttacagtaggtgagatattcacggctgtgttttgggatgatgactgggaaaattctattgtaggtgggtttagcagtgattgatacctgtcgtgagtcttcttcaaaagagcgttaccagctccgaacatctcttctacggactcaaaattgaggttcccatcgagacatgcaagtggattgctacctcctgctatttttccagccatttcccaaagagtaaaattcctacctgtagggtaaacggaaaggttatccgttactagtttctccgtaagatctaccattattggatcaatgtgtttcttggaataggtcttatttggtacagacgacgatgaagttgcttcgagaattttcacttctagtactgcaaatggaagtttgttatcgtttatctcgatattgtcgtcaatgcaaatcagatagtcgttgttagtttcaatcgatgaatgactaataataaatctgcttcttctgcatttgatgacgagatctgtggtcttgaggttatgtgagtaacaccaatcgcgacaaaattcgtctagtctgttagatactggcatcaacgatggttcgcatccgtttaatacagctttaatatcagtatattcgatggtgtcagtagatatatgattacgaaggccaccgacatggcaaagcaggatggaatcgttggagctcggataagatactaacaaattcgggaaaagattttcctcggtggaattgtaaaggttggtgacatcagcgccaggctttgccaacggttcgaaaagaatattatgagcagatgaggaagaattcgataattgttgtgacctattagaaccggggtcagattccggtgaccctactggagggcttgattctgtgtcacgtcgttgggaactagacgcagcttcttccctttgagcgtctctgaacatacgtaacgatttaatggatccctttctcttagacaagagagcatccccgcttaagatttttttagaagtagctatcacggagtcatcaaacaaacagaaaccaaggttaatcaacaggaacttaatttcatcctcactttcctttgatattaaaaatgaccctaaggggttgaacttcgataagaaataatggtcgaatttcaaagtactgtctataacatgcgatgaagagaccacggaacttttcctcgaagacggagcagtgcctgaagtgatcccaacgttagaattggcccgagaattcgatgtgttgccagttttggtattaccagaatcaacaggttgctggtcagcatcctgttccatttcatgcaaaagatcaacgatcaacgaaatctcaagcaagtatggatccaaatccacagtcaacatagatacaccttcatggccctccttaaattctggacaattcttcaacgagttgataaactcctgtgccaactgcgtaccgtacgggtagtgtttcaagaacttcttaaacaatttcctcactgcaatcttttgcaaaatcaaatacctggacaatttctgcaattctaaattacacctatccaaatgctggttgattaacttgatcctacgtaactttttgttctcatccttaatcaaatgcaactgagtcaaataattctctatcgaaacgatccgtgtactgcactctttcaacttcatcgagatgaaaacattaatcatctcgaattgcgaccgaaacagcttcttcaaagatcgtagttcaggatcatcttcgatactattaggtctaaattctgggtcctggccctctcgtaccgtagtacatcgtctgataccaactttcaactgctgataatcgatattgtgaagtttccattcaggaacagacttatccaatatctgagtcccaaacttcatatctgggcccttatatctctagtttctaggttgcaagatgcgataggggaatgaacagggatacgattcttaccaaaacaaaaaaaacctactgcctcgaagtatcccgtcttataaattgaaaccttgtccttctcaagggtgtttctaacagcttataaagaagagaaagtcttatctcgagagaagagtggaatggtacgaaatgataaggctgggatttactatgtgggccctttataaaaggcaagttaagtggaaaatggaagaagggaaaaaaaaagcgtgtcacgtgcttggattggaaacgttccaacgtggggtcccgtgcaacatatcaaagtacttatctcactcgcttatatatataaatatatatatatatatatattcacatatacatgtttacatacacacatatgcacatccgttttacgagggcatgtgcaaggtgggtgaggaccaatggtgtagaactaggtgatcattttgcacatcaatatatcaccgcgaattcacttttcacaagactagcccaagacttgccctgaatgctgaaaactgctggaagagtaatcgaaaatagactacccacatctccattgggaagagaaagtactggagttgctactcccattattattgtacgcgcattctgtggaagagccacagacgaaagtgtgtattgagatatgattcataactgtctctgttcttaagttacttcggacgatactgccttttgtatgcgtgcgtttcgtccacgtgttaccacgtgcctaccattctgttctgtgccaagtcaaatagttctctcgagcgcccgagaaacgggcggaaaataccgacaaaaggtatatcgcactgcgaaaaatgtacatctttacggtccgaagcaggaacagggcaaccagatagcctagaactcaggttcaacgttgaaatgtcacgatgtgaaacatcgtgagcctatagtcaggccctattttcctttagtttcccttcggttcgctgtttctctctcgagaactcgttttcttgtcaatatgcgtatatattgcacattgtgtatgcttgttgttccttctgtagtttctgtacgaaaaatgtgaaaaagaaataatatttcaagttgctgccaaagtgagaaatagcatttcgcattatctgacctctctctctctcgctgatgttaccagataaaggtttggggggcactgaggtttgatgaacctaagagaccaagttaagtacggagtttcgtgatgcgtaggggtaattctggagcgcgtggtaaccgtggtggttcgcgtgggaaaccgggccagaacgaacatataccgaattttatcaagaacaagccatggtatttggcagaagaaagtgaagtaagtgccagtaccagtgccattaacagtaacagtaccatttctggtaccggtactggtaccggcactgaattagaagaaaaagattacttatcccaccataggctaaagaaaagttcagtccccgattcagggacggcagaaatcgatgatgcattcacttatgtaaggcctagtggaaggaaccgtaagaagaaggattcatatgacctagatttggacgccccagtacgaagacgtgacgagaaagttattgagtcgaattatgatgcgaaaagagatcggtggtatgggtacacgcctgatataaaggagattgaaaggaatcataaggggcccgatacaagtcatagggaaatggacgaggttcagatccaagagatggaaagattgggtttgaaaccggaagatgtcgggttcgatgctactcaaccgctgtcaggcccaaaggagaaatataatccggtcagactaagggaggataaagctgcttatttgcaggatatgtcctctgaggagatgttgtacgatccaaaatcaagaatttataaatcaaaggaagagggtacaatagatcccaaatccaagatgttccatcgccatttgactggggatgccttgcaagtgggtgtaatcaatgaaagggtgcgacaagaggctgttcgctcggggattaaagatttcgaagtcaataaagagaagttgaaccatgttttcgcggcaaacccgaccaaatatgaacttatgatgcgtacagaacctgaacggaaacaggaaacttctgtagaacaggatgcagcaccaaagcgaagaaaattcgacaagaacagtttcaaagagtcttcttcttcttcaaatccgggttcttctacgatgaaggatttgtacgataaatatatgtaatgaattgtttatgcattttgaacatagcatgggaaccaacagaaatttgtcagtcatggaacttggattccatctgaccacaaacgcgttggcccagatttgaactccgttgtctattccttgctctacctcatcatttgtacggatatcatcaactgaaaagaaacgtttgaccaatttttcaaataaaatacaagcgatgagatgagatgagatgaagtgcaacataggaatacggcaaggtcagctcttgccccacctgtagcatcgctcttttgtgtggcgtttgacattatctctgttaacaatcgcttgccttaattatggtagtgttggaagaagagatgtcgatatactttcaaaatgggttaaggaaaatcgcaccatattataatgcaagatcatcgtttgtgaaaggcagatggttcggcaagtctttgacccagatattcattgacgagtttgcacatacccatgaagaagcacaactgaaaataacggaaggttttatcaagctgttgagggaaggtaagcagctggaaggagatcccattattaagaataaagatattctactcacctaccaacacaaccatgaacctccagtcaaaaactggggggaaccaatttgtgacgagaagcacattatgggaattccaattgtgcatcaagatgaacaattactagtcattaataaacccaatggtattccggtacacccaacggcctatttttataagaatactttaaccgagctgttgaaagattctttgggatatccagtacacccatgttatcgtttggataagatcacttctggtttacttattctggccaaaaatcccatcgatgctaacagagttcaatctaagataagagatcgtgatatgaagaaatattatctagctagagtaaaaggaaaatttcctgaaactgcagttgataaatccccaatctatacctgtgacttgaaaattaaatcagagccattatcccctttgaaagacgcacatactgagtttgaattaatggaatacgatgccgtaactgatcaatcaattgtattatgcaaacctttcacgggaagaacacatcaaattcgtatccatttggcaagacagggacaccccattacaaacgatccgttttataaccttgataactcaacgtacccattacggtcaaggtttattattgagaccccagattggactcaactaacaaacgaaagaatcgaaaagctacggaagcggttcgaggttgaactggatgatgtctgggatcaattgaatgaaaatcaagaacgatgtcctgaatgcgacgaagaaatgccaaaagatccaactccagaatcgttagagctatatctacatgcttggagatacaaaggtttggatttggagtttgaaacagattatccctactgggcgaagttcgaaaatgagaaacaagcttaacatcaagttttgagttgtttctttattcatgtatttaacttttttagtatccttctcaatcaatattgtatatactatatatttattcaaatagcagcatatgtgttcttgcatttgttcttcaagaggtcaatttgttttacttccttgtatcattcttaccaaccaatgtccttgcgatgtactggcttggccacctttaactttcctttagtcaagttttcaagtggatacatagatactttgcactcaccaccaagctcttcaatcactgataaagattgagtttcaagatccacagattttagaatggccacaaacggcgtttctattcccaagctgtacgttaaaccatcgtcaaaggtaaattcagcgtttcttgcaacaagtatcaaacctggtaccaattttcctagcgcagcttcatctattgcggtgttataagcatgttcaaaaacggtgataccgtaagttctttgagcaattggtgggactagattatctattggacccaatatttgaggaataaatgaatgacaagctttaccaacacatttgttactgttttcgtaaattgttttgattaacagatcactaccagtactttgtgatgaggagggaatatagtcctgatgggaaattgctgtctcaattggattctttggatcatatacaacatatgcttgaatttgagagtaatcttcgaacaagaactggaaatctctgacaaccaacttatttgtattccttctttcaactatgtgatcctgagattcccagatgtattttactttgcttggtttaacagtatcagcctgaactgtcttagttaaccaccaagtactttgctttgagaactctaattctggaatagtacctggttcaaatttcgccgtagttgtccgtcttaatggctggaaactggccggaatttgtggagcagcagatgaaggagtggctggtgatgagtttgctgcacctggaatagtctgaattgaaggtcttcgttgcggtgcattagaaggaggcaatggtggagggccgccactgcttggtactggaggagcaggggcagcagcgggctgttttgttggcagtttctgctcagtgttttcggttttaacgcttaaaactggtgctggagcctttgttggtaatggtggtacaggtacgcttgaaggaacaggaggaattggtgcacctgttggaattggcgggacggaaggagcagatggaattggaggggctgcgggcaatttttgtggggcgttagtagcttgtggagtttgtggagtttgtggggatcccggagaagtatcaattgtataaacatgagtgggcctaattctttgaggaacagttggcgacggagcctcctcttcttcatcttccactttcttagtagtttcatcttcggattcatatccagaaaggccttgacttccctcgggtacttcatctttatgttggaagtctgggtctttgtcgtaattcaccgaacctgtaatagcaggttgagcatcatcgactccatctacaaagctagattcgctttcttcgtcagcttgattttctggggtttcggcatgaccagaagtttccacagcaatttcttcagtcttcttcctaaacattggcagcatcgatgggtcggcaaatggcatgacaggaaccgctgttggaagagatgacgtttcagttggactttcagattcttcctttggtttcttgcttttggttggggtcttcgaagagtcagcagaaggcattggcattccaaatgggttgaagtacgcattaggcataccgtatctacttgcatttgctagtcttgccatcttttctcttaaagcagcacgtctttgttcctcttcattttcgtcttcagaagattcattttcatcattatcatcacgatcgtcattctcgttaactgactcctcaggaatagagtaggtacgctgagggtgagagccaattgaagcagtatcattaggaattggtggagctgtgtgaatgctagaagtactgacatcaacttctggattttcagcatcggaatcttcaataacagaggcatcataactttcccttttttcaatattaactggagaagttgcactagcagtagcaacgctgccggttggggacgacacactagaaatactttttttccgcttatgcaaagtttccgcctgttcctgttgttgtttctgcatatgctgtaacatggatatcctttgctgcaaggacattttagattccgacttagcctcctttaccaaatcatcgctattaacaaaaccactcctctcagtatcaccagaaccttcttgaaacgacagactatttctcaactgtctgacattatcctgagaaacctttcccttctggactggtgcagttgcagctgcagcatttggattgacagtctgtgtttccggaatcttgaccggagtttccacatttggtttctcctctggctgcttctcttgagcaggctcactagcagtttccttcaaaggttcactaacaaaacctttggggaaaataccttgctttgttttaccatcagcatccttaaactcaccaaagaaccactcatcgtcttctatttcaagcaccgtaatgatctgacctttggaaaatggtaaatcatcctcaaaatctgaggtgtatggaaacaatgcctcgaccttaaatggcacagacatctttaacacgtaatctagtttcgagaactgttcttctagtaagctggtccttttatttcactcgccgagtgttctttgttaaaggggtggtgaaaagttcgcgatataaggaatcgttttaatttcaaaggctttagtaacatttttccaaacaattttaaaggattagatttcaccgaaaggtagataacgaacgaatgatagacttcacgtcaattgaaaggcatatatgaacgttcaatcagcaggtgagggttgcagaacttatgactgattggataaggcatgacattgaattcgaatactcgtttggcgagattcattcgatttttagcgtacgactatgattcggaaattgatagaaacgctttgtatcgtcgcatcgttggagttattggtgttaatgggtttatagcattgttaaaaaagcaccggaagttaacggccagttcattattcgatggtttgcctatcgttgttgctataccgttactgagaaggataattcgtcaaagacatgccagctggttcctgggtttaacgattggtctctcgcagctcaaggctaagctaccgcattggattgtttcatactgggctgtagaatctgttgtagatcaaatcaagctctgggttgattattccagtataagcgaacgccgttggattcttctcaggcaattggcagctagtctcttgataccaatcctataccacagaaatcaatcgaaggggagattatacaggatattattcgagactagaaaaccttggaaggacttccttttgttatttgtcgcatggaatgtcgtcaagacttataagaatgtgaaatccatccttttgaaagagaagcttaagaagaataaagtgaatacttcctcaatgacgttcgattcagaggcaaaggaatctcagacacaacatggttcaatgacaaggatactcatgcaaaggttagaagagttaaatgagttatccgataagaaatcaagcgggtcggtcaaagaacgagtgtatggttatttcttcagtgacaattttatcaaatgtgtaaaatggacgctctggagacaggtggtgatgttaatcttcaacggtcaacattccaaatgtctaaagccattacataaatcgatcatcatcatgttgtcattcactttgctgagcgacccacaacatttagatattaactgggagctactcaaatacttggggagatcaacgttatctcaagaacttggtaggataccacattatcaaaaaccaatcattttcgctgcccttagtctctcatatctaaccaggaacccaattgcctaataaacagactgatttgttcctagtttgatttgtatcaatatgcgtgtgttccttttctaattagagtcttttcgtgtcggtgtgtatataaatgttacgcatatgttgatctatacacagatcccgtatacatacgtatatatatatatatcacgattcgtacgtttctaacgttaagagcacttatttttgaccagtggcgcctggagcggatccatttcccttcaacctttgtaggatttccttgaatttggatctatctctgccatctacaatgtcagcatcctccaagttgatcaactgaagagctttgtcccaaacagtcaaatcttgagaggcaaaagcatgagtcttagcaaggaattcttcagcttctttttgagtttgatcaattccctgttgcttcttaatgttatagttttcatagaaatcatcaatatgttttgcagcttcctcttgtaagtctgccttggccttatcttcagcttgatctctttcagaaatttcaagctcacgtctagctttccagttttccaaagcctcggacttccctcttacaacaggctcagcagaactactctgtggttctccgaattcgtcgtcgtcttcttcttcttctaccgggttcgatacaccttcgacgtcttgtggttgatatgatgctgctgcaatggcatctgcttcattgacagatgttccaagagtttttgaatcagagtcgtccttacttagaagctcggagtcttgctctgtcttgaattcatcacctaagatctcggcttctcttcttagaaactctgtttcgtcaccatctccagtaacaaatccatcttgcactagatcgtcttctaactcaggaaacttatcagccatcttgttcaattgtatctatatacaccactcgtgtccttaataaatctaacttacacgctagagagctgtcttcaccttcaccttgctgtgcttgattccctcttgtagacgtttatttcaacttcaattgaatctttcaagtcgtcaataggggaaagcctggtatttttgtatcacgtgatatcgttgtctacaaagaaagctcatcctatatatagtacttactgctgtattacagaatcattccactagtatggataacgatgagcctaggtctactacatctaatgcttccagatctactattttgattcctttcgtattgtgatgataaccttttgcgatagcgatgatttcaagatcacattggaaggttgttcctggtgataacagcggtagttttagatcatttgtgataagaatcaaggtctgtgctaatggactctttggtctatgatacactacgagatttaacactctaggagtagtgttttccacttgtaaagtgactttgaagggctctcccttcttaacggttatcttggattgaaggaaattgaaatgcgcctgcgccaggacacgcggtagttggacacttggaggctggataaaggtaggcgtgctggtatttgaacttactatggacttagagggagttggcttccctagacacacttctgtctcccagctcgtacgaattttataagaggatccgatcttataaataattgtaactttaatcaatctcgtggaatcctgtaactgataatttatagtatatgcatcatgacgtttcatattaagcggaaattctatcatttcctccataggttgtaggggtaatttaaaattcccatcgcagagttcgtaacatagggagtcaacagtaagatatggttcttctggaaataactcctcaaacttgcgtgctagttgaatatcaagagaagatattacttgagaagttgttgaattcctttctggtcttattgcaatgtttctgagtctcatattcatcaaagagtatattggtaactccactgtttttgatttcaattcgcgatgaaccgaatccgtactttcggctgatcctggtggagatgcagttagtggttgaaaagaggggagtatatccgattcattaccattggatcctaatgcttgttcattggttttcaatggtggctccaagtaaaagaattggaagctgattcgaccttgttggcctacattgttcactagataatcggaattgaaaacggtttttctgataaacgttggatctaattgccatacatggtcattatgtttgataagtgagtctgcatttttatcaattcgtactaggctatccttcaaattaatagctaaagagtgaaacaggtgttttaacgggtcgacggatgtgatgaataatggtaactcttccccaaaaataataaaagaacggctgattgtatccgagacatgaacaccagtatcatcaatgctgtactcttttagcggaattgtcacgtcaatcatcttggggtctatgatgcactacctagaactcttcccggtatcactattttcttcacatattcaattccgccattgagactgttttctttacatctgcaagattgaaaagatcacttttgagatgtttccttaatatgatgaagatacatgtctgaaagaagagaaggcgcatcagtatcaaaactaactttcaaagagtaacctttgaaatgtttatttgtatataatggagcatgtcaagctttgctgagatgtatttatcttctttatggagaacttaccgtttcaattcgaaagagagatagatttcgatgataacataaacagatcagatcataagtgattcaaagcaacaagatttattcaattatgtactagtttgattatttgcaatatcggtttgtgttggaggttgtggagatgatgaagatgatctgccaggggaatctgcagatagtgacacaggaggagttaatgcagcagtcgattgctgtaagggtaaatgcttctcctcttctgcttctagttctgcaggagattcattcaacgggtggaccttataaacacccctttccacctcttcggagtcaaataccttatttttcagtttgttccaattatcatgtggtatatcccaaccacatttttgagccactaacgctgcgacatcatcacataaaccaagaagggataggtcgaattcggcatgctttactgggtctttgttgattagaacttgtggtacatgggcaggaatcatgttaacaatttctgataccggtgcgactttcaaagatgtaccaatgcagatgagtaaatcacattgtaaaacgtcttctctaattagtctatggaatttcgacggaagggcttcaccgaaaaatgtgatatcaggttttaacacaccaaaagatttgggtactgaccgtccatgatggtcatccatatcatcatcctcgccatctgcaagctcttcatcagtcttggtcttgaaaaactctagtcttttgctatagcagtaagggcaaataggaagttgtaggtttctgatatttgggaagattctttcaccttgaatcttccaatggcatgtgacacaggatgcagttgcaaatgaaccatggcattgaaccatcttttcaggttctacaccggcgtaagactccaaattatcaatattctgcgtataattccgcaaaagtttatctttatcctggatcatcttgatgaaactgtgtaaaggtgaatacatgttctctgggggtagcaccatatgagcaatattataaaagacagatggatcctccgtgaaaacttccaaactgaaaacatcttgtggatcatttaatccaagatctcccaacttagagtagaaaccttcagatgatctgaaatcagggatacccaaagaagttgagatacctgcgcccgttagtacaataatttttttagcagttttcaactttgccacgaaatcatcgatggtatggaagttggttagtctaattctagtcgataacactttgttcattgctttttgcaagtctttgatcaatctaacagcatgcttcttttctaaaggatcttcgaaacttggacttggataagtagctgtatatgtatctgatacatttttagtttcagagctgttcttctgaggtaaactatcatcgttgtcagcgttatggaccacttcctgtatggcaagcatcaattctttatctttgatctgaaatcccaataacttgatcatatgatacacgtataaagagttcaagtcctctggtaggtaatcgtccaagaacctagcggaaccaaactgtttcaagtaagaacgggcattaagagaatcctcttttgaaatgacagggaaaacatacttcctagaaaccgaacgtctttccaactttatcggatgttccggtttctggggggcatactgtctatcgctcaaagtaccattagtggccatggtaccagtaccattaccactaccgctattagtatcagccgaagaagcagctagtgctgtagaacctgtgttagaagatgttataccaacatggtcagatgccgtaccgttgaaattagaagagacttctttctcttcgtattcatcaaccacttcgtccaattcgtcggccttagtttcttccagtatatccttctgagcatcttcctctgcatctgcatcagcatccgcatccgcatccacatccgcatccgcatccacatctacgtcctcattctccggactcctcgcggcaaacacgtcagaatctcccctcgctttcttcccagactccaagccaccatttccctctgccacagactcttgttccaacggtctcttctgaagagttccgtaatattcagtcattaaactaaaaaaatcgtctcgtacccctaaatcaaagtaaaaaagttgatttgaactccagataatgaatattccgcgctccagttccagctagtaacaatgagcaattaaatcggataccccaatcgtactctcttaacaacagaaacagaaaactggcactgactctacccagaacaattcgcttaaactttacgatattaaagttaaaaagaaaagaattattggctttagtcttcaaaggagaaggaaaaaagatagacggcgaaagtgcacttcagagagaaacaacgcctcttctaccacctcttgtacctagaattcaacaatcaaggatgcgcacggatccaaatgtctgaaactgtcgccggataagtctgctggtcgtcactacccggtataattaggtggttgccatgttcttttcaaatatgtcttcggggttttagtttgtttcgtgttttcgctttagaaaaaattcgaagctggaccatgttttcttcgtcagttgtgatagtatcacgtgacttaatcatgacacgtgacttggttctttattgtatttcagggttcattgttgtattcactataaccaccgtattcgaatctatacttgggtccttcttttggcgctgctgctgctatacctgctggaccaaccgaacctgttggcggcacaggtgacatggcagcggtgccaggggttttactagtggtatttcctgcggcagcatcaatgctggctccggcactggtaccggcaaattggtttttagatcctttgttgttcggttgctccctcatgccagctaacggaccaacgccgattctggacaacgctaactccgcgcttgtgttatcaaggttcaaatcgttgacaatgtaccctgtttccttgcacaattctttaactcttagtatcagctcgacttcttctctgttcttgagatcgacttgttcctgtaacgaattcacgtattctaccgcctgcgttagaatttgtccctttgtgggcttgttagcatttgcactggtccccttggatttagaaaccggttcgtctttgatcttaggatcgctgttctttctataatactcttcgaaaaattcttcaggaataatactcaaaaattgttggattagttcattgatattaccacgcttggcaccatcgtcatcattcatggttaaaattagtaagatagagacttataccgatggtaagatgcagtattgatgctactttccttcacctttttcttgccaactcacagcattcaaactgttttcatctgttattatttcattttatatcaaaagtcaggatttggaataactaaatattagaaaagccagtggcgaaattaaagatcaacctttacaagatacacgcctaacagcacaacattaggtatatcagcttgttaccgtccaattatcgagttgcattgaggcacgaactattagctggcagtaaggcatcaaggtataagttaagttacagcacgaacaatgggtcaaggagcttcttctcatgggcagaagaaaaaggataagaaacaaaagccaaaatatgagccaccagtagaatcaaaattcggtagaaagaagagaaaggggccctctacggtggagaaacttcctagcgtttatccaagcacaagatgtaagttaaaacttttgagaatggaacgtataaaagatcatttgctattggaagaagagtatgtgacaaactctgagatcttgaaaccatttgagaagaaacaagaggaagaaaagaagcagctagacgatatcagaggtactccgttatctattggtactttagaagaaattgtggacgatgaccatgctatagtgacaagccctacgacaccagactactacgtttccattttgtcctttgttgacaaagagctattagaacccggctgttctgtgttattacaccataagaccatgtcagttgttggtgtcttgcaagacgatgccgatccaatggtttctgtgatgaagatggataaatcaccaacagaaaactacagtgatatcggtggattagaggcacaaattcaagagattaaagaagcagtcgagttgccactaacgcatcctgaactatacgaagaaatgggtatcaaaccaccaaagggtgtcatattgtatggtgctccaggtacaggtaagacgttattggcaaaggctgtggcgaaccagacttctgctacatttttaagaattgtgggatccgaattgattcagaaatatctaggtgacggtccaagactctgtagacaaattttcaaagtcgctgcagagaatgcgccaagtatagtctttatcgatgaaatcgatgctattggtaccaagagatatgaatcaaacagtggcggtgagaaagagattcaaagaactatgttggaacttttaaaccaattggacgggtttgatgatagaggtgatgtgaaagtcatcatggctacaaacaaaatcgaaagtttagatccagctttgatcagacccggaagaatcgaccgtaagattttgttcgaaaaccccgatataacaacaaagagaaaaatcgtcggtattcatacatctaagatgaacttagcagaggacgtagacctagataatttggtcacttcaaaagatgacctatcaggtgcagacatcaaagcaatgtgtacagaagcggggcttttggctctaagagaaagaagaatgcaagtcacagcacaagatttcaaggaagcaaaagaacgtgtactcaaaaataaggttgaagaaaacttggaaggtttgtacttataagtagggattaatcttcatatatatatatatatatatatatatatatactacagtttaatatctttaatatcttcacatatccaaattcaatctccctgccgccaacatttatgcaatgatttatcaatctaagtttgtatttttaaccttttacactttcacaacttttcgggcagatagagggaaacgataaatatagaaattacgaaaagttgaactttaaatgttttaaagattgaaaggacaacagtataatgagatgagtagaaataaactgcaaactaacaagagccttgcagtatatacgaggtgaagaaacctgtgacttgtgattgcgagagaaagcacaattagttattgtcaatttttttccttatctcgtttctaacaactgcattattgattggaatttttttgataaaagttcaattagttcatatttaaggactgacaaaactttgtggtcttttcaaggagctatataactggataagttccattattggtatttgtgagggttcaaggcgtgtcaatttttttctgaggtcactggacgttagttttattcattgaagtcatttaaagaacccttggatatatcgagttgcttttagaagtcatgtcagactctccggaatacgaattgacgtataaggttggggtggccgaaaataacaactccaagtttcggaaaacgatggaagatgttcatacatacgttgagaattttgcatcaaggctagattggggttattttgctatctttgatggacatgtaggaagtgaggcttctaaatggtgtggagcgaacttacacagatacttggaacagaaaatattagaggatgaggcccgtgatctgagggatgttttgaatgactcgtttgtgcatgcagataatgagattaacaatgcattgaaggggaatagcggttgcactgcagccgtctgcgtgttgagatgggaaatacctgataccacagtgcccagtgaggacgaaacgataaatttacaacaacataagaggatgttatatacagcgaacgttggagatacaagagtggtacttttcaggaatggcaacagtatacgattgacatatgatcacaaggcttcggatattctggagctgcagcgtgttgaaaatgcgggtggtttaataatgaagagcagagtcaatgggatgctggctgttaccagatcacttggtgataagttttttgattcattggtagtggcaaatccatttacgacaagtgttgagattacaacgagtgatcagttcttaattattgcatgcgatgggttgtgggatgtgatagaggaccatgaggcgtgtgagatgataaaagacataaataatcccaatgaagcagcaagagtattagtaagatatgctcttgagaatggaaccacagataatgtgaccgtaatggtaatatttttggatacttcgcaggagaactgaagtcagttttcgatgttaatgcagttgtataaaattatagatatatatatatatatatatatatatatatataagcatatacatatcttcctagataatacgttcttctttgaagcagagctcttttttagaaatcaattgaaaggagttgcgtagttcattgaccaattactccatgcagaatagagcattagaaagcaataacggtattatattagacctacggttaattcatgtcataccgaggtatgacaaacatcatatgttaaaatcttccaaattcaattcattattgtcgttagccgcattccaatcaatgccgaggtcgttgaaatcgttcaacgttagataactacttggattgccattttcaggaacgtttactgcagaaggtggtgcatttgtatcattgaaatttatttgaggatcattctttttctcgtttccaccagatgtgttttgtaacccgccaaaacctacctggttatccattgagtcaaacatagaaagatccatgccgtttaaatcaccaaactcggagttgaaagactgggcttgagtaattccagcagacggtagatcagtatcaaagtttgttagcatgtctattggggtgttcttagcggagtatctctgctgctgttcatgttgttgttcctgtggctgttgctgttgctgttgctgttgttgttgctgctgttgttgctgtttctgtttcaattgtttttgctctaattgctgctgttctaatttctgctgttccaataactgtctctctaacttttcttgttcttgtttcttgatctgttcttcctctctctgtttcttcaactgcaatgcgctatctttcactgccccaacgtaatccgccgttgtttgtaatgaaacgtctaaagtatcaagaagcgagtaaaactgcgttattctatcacctagtcctttctgctgagcctttgaaaaccctgtcgtcaccttgggatctagtttaatagttttcaattgctgttgagttaacaaatcagctgaaagtcgaagtatatcatcgaaatattgcgtcaacttgttctcctgtctgtcagaaacaccagtcttaggtaccattatgaaactgacgtgtttaggaccgtaagacgtctgaccatccagggttctgggagcagtcctgtatcatgtacgatgcggataagtgattatgatgaatcgttcattatacatttcattgaatagtggtttaaagaaaatcatgagccaatcaaaacgatggaaatggccatattcgacagggtaacaacatacattttatcaatcagggacccctagcttcatacatcatatctactacgtgctacaaaaagtactgcaaacaggtgtcacgtatatacactcatttcacgactacactagagctaggtgtccctcaacggtcttttcagcaaagccattgacgtttcacaggcttgaaaacacctcttctcgagtgcatcaactttttcagttttcagttttccaaggcctcaattaggatttttgaaaatgaaaagaatgggattttagttttaattacagctttacgatatttgtgaataaggttttactagaactgttcttgttggactactgttgttccttcttagacttttgtattttgatctttgtttagtgttattagattttgtttcaattgaattcattacagtctgttttaattgcttcttgtccagaatcgaaatcataagaacacattaccagaaaataatcacctataatgttccgtttatctgctgctagaactttggccaaatctgtcaacaccgttgttgctaagcgtacttatgctgaagctgccgatggtgctttgaagttgcaatttgctttgccacatcaaaccttgttttctggtactccagttacccaagtcaacttgccagctaagtctggtcaaatcggtatcttggctaaccacgttccaactgttgaacaattggttccaggtgttgttgaagtcttggaaggttcttcttctaagaagttctttgtttccggtggtttcgctactgtccaaccagactctaccttggctatcacttccgttgaagcattcccattagagtctttctctccagaaaacgttagatctctgttggctgaagctcaaaagaacgtctcctctgctgacgaagttgctgctgccgaagctgctatccaacttgaagttttggaagctttgcaagccgctttgaaataattgagatgaacgaagaattacaattggaccaaggtataatacacttgatacggatactctacttggaagcaattgttttcccggttgattgtaaacctgtctcggcgtttgtattatccttcgtctgcttttttttcattattctaattcctattattccattgcacaagcttacacaacacaacgacgaatacatttcatgatttagcctaaagacccttttttgttgctccggtcattgtcctttctttccatacaatactgtagtgtgaacgtacgaataagactgggaactattgagaattaacctaaaacgactattactaaaatatacaacgaattaaaacccagcgaattaaaagaaatcagaagaaataaatacgataaaacctaaaaattctaaatgatatggaggttgatacaagtgatgtctcgattccgtttcaaaagggggttctagtctttgttttaatgaccaacaaacataaatctttcttcaatatactattccttcctttctaacaatatcaaagaaaacactggatcgattataatttgtctatccccgttaaaaatattatcaattaagaaccgaattgaaagacttagattttatattttttagcagaaacgatttgtgtgtaactgatgtctagttttaagattcatattcatatataccgattaaactgactgcgcatactgagagagatgatctggttttggcatcaacaagagttagaaaggcagggtaataaatgggtataaggtcctcacttgttacccggattttataccacgaaatcgaaatttttccggcgggaaatcttttgaggtcccagaaaaagacattgttttcccccaaaaatattttcgcgatttttctccataacgcgtttccgtgatgagatctataaccagcaatcctttaacaaatatcattgataaacactggatgagaagtatgtctattccatcatattgattgcacctttaccaataattttatcaaatatatatattacctatggaattttaatgtcgtgacctctgaaaaaagacacagtgctattttatttcatttttattttgctaaccattccttataagatcaagttctaatctcgatcttaagtttatatccatttgctataccatttgcaacaggaaccacgagccttatatcacctaatccaaaaataaacaacgtatatgccaccaaatagcaattcacatactcaggtgagattaaatacaagcaatgggccgttggctcagatctggctggcttccaatttgagtagcatcaatcggaacattgcaaagactaatatcgtggaatctgttgaagagattgccaaagctgcaggtgttaatctagatgatgaatctgtggaacctatcacattacgtgcttccggtgagttactacatggtgttgtaaaagtttattctcaaaaagcatcctatctgcttactgatatcacagacttactgagtaaagtgaaatctatcttcaagggatcgctgaacaagagcgtcacaattcagctagatacagtggcaaagttagatcagcttttattgcaagatgcggttacagaacttgacgtcttggagatgcccagtttggatttcttgaaagatatccaagtgccagaaggttttttgatcgctgaacgatcaatggaaagacaagtgcaaggagcagcacctgtaacatccgccattgcagcacaacaacaagcatgggatatgtccttagaagttggaaggcgattcctggcagatgaagatgatgacttgaatgctattgaacatcacgattcatctcatttgaaattagattttgaccttggtgattctaatcaaagcaataacactaaatcatggggtgaagggactcgtgttactgctagtgaagtaaacgcggatgatggagaaaatgaaggtgatttgactattagaaatgacaatgacgatgatgatgaattgctaccacttaacgatgattgggatttgggattaaacgatgatgatcagaatatttctggtaatcagtctagccatggtagcgacatgtctgtagagatcgggagaagggctgatattactcactcattgcatgatgatacactcttagactttgatctagggctgccaaaggacacagaaccagagcatcaagagcaagcagaggcatacataccacctagagcagtaaagaagagggcaccaaggaataaagcctttatcaatgttaagaaggttctcatagatgctgatgccgaattaaacgattctgaagtgaaaggaggaccatcggactcaattcttatcgtttctgatgagacttcgtccgctatatcaaagaaaaaaagagccatcgatgaattatactctgacctggacttccttcctcaaaagattatatctaatttcttcaaccataaagcttcaaagaagcctagagctctgtcacaatccagccaatctgatgggtccgatgttgatatagatatctctttgggtatcgatggaagtttggtacacaattctgatccattcgatcaccaacaaatgggctttgatgcagaatcagaaggaccagtgtttgctgatgatgaacctccagttcttgcagctgatacatccatggaagaaaatgattaccaagccattcaatcagacgaatttgcctctcgtgggtcaattgaaaaggaaaaaagtcaaaaagtagagcttgctaccggtgaaatcgtgtctaaatctacagtggaaatggcaactctactgagagatgaaatgagctccggtgaagctacttttgataaaatccttacttcgaagtaccaggataacgcggtaataacaaaaagaatggccagtaaagcattctttgagttactttctcttgccaccgcagactgtatatcattgaaacagaaggaaacatttggacaaatcacaattttaggaaaatcaaacttatatgagacgtttgttaccgcatagacttttaatttggatacttttataacggacattatgtataaataattaataatatctgtttttttaagttggtttaaatatacatgacggcagatcagttcaagttgttgtgctattcgatttcttcatttggttgttgctgttgttgctgctgctccaagtattcttgtattgataactggttaatgtgttgtaaaagctcctcatcagcgaacctgttcatttgggatatttctagatgtttactatcaattagtccttcgattgtttctactacatactcactttctctatcatgtggttgtggtggtagtacatcgaattcaaacacagaatgatctgaccaaatttcttcgggaatagcagccataacggatgactcttgagaaagaatagcaaaccttaacaaattaattggaatgttattgatgaagaatgatgttggcgccacgtcgtcatcatcatcgccatcatttatatccttcactgcatcagtgtcaaacgaagtggaattaaaaatgcttgctaactcatcaagtaaaaacttcttagcttccgcttccttccaaatggcgcccattctagtagtataagcttttgtctcgatagaagcgctcacagtaggaggttttaatttaattttcaatttggatggatcaccaagtaacacttcttcgtatatcctgtaaagagatgaaggatattgattccaaacacgttttaacaactgcttagcttcttcaatgcaggacaatttccaataagaatatacggcagtcattcccagtcctaaagtaaaccactgtttgtataggttgaataaaggattctttatcatttgaataatgtactgatattcatcattggcagccaaataatgatccatgaaatatcttgctcctaaaggatcttccaaaggtgataaagaaagaagagttttacaccactgagcggctgttgaaacggcacctctttgagatacgatttgaatatatctcatgatagccaaataaaactgtctgttgtaaaaatatatgtagggaagttggaaatccttagcagtgaactcaatcccatttttcaaacaacggtcgaagacaaatagtgcacgttcaaccaaaccattactgttagatttgtcaccttgccttacgcatatcaaggcaacttgtaagagccctggtacatgataagggaattgcgaagatattattgatattagtgcttcatgatcagggtgtaagactgtactcaggtagaattcggttaaagcctttttgctattggtatcgtttaaagcatcgaatttataataagtaaaatgcttagaccatttgcgttcaacatcgtctttgatgacagcatcccaatccaaaggacgctgccatctcgaccattttgttagatcgtcgttagacaactttttcaagatgaattctccacgtactgttggtagccagtcgtctcttatcttggtgaactgtaactttcggacagacccgccgttggggacacttctcttgtccttgccactccagttctttactaatctttttagtctctcaatttgcttcaatacttctggtgatacatgagtggatgtcacagagtcaatatcttgtaaggtctctggtgataaatcatcaaaaagtaatttgaattcgttatcaggaattaactgcttgaaatcgaacttattaaacaatgcattcaaaggtttgaaatgtttaaacttagtaaacccaggatcatctctgagattatattgtttccaagtcgataagttatcctcataaccttggctaacctcttcatcggcagtcataaacccatcatcgtcatcgtactcatcgtattcctcctgagaatccagcgatttgtaagatgttatatttttcttttggaattgagtcaacaaacgagcaaactcttcatcatcttccccatcttcgtcttttaggctaggaccttttttgctttggttcttagtcttcttattcttctttttacttgtcttcttagtattcctcttctgagatttagtctccagcttaattattggagactcctcctctactggtgagacagccgcttcttcctcttcctcttcctcttcctcttcctcatcatcatcatccattaacataaacatatttgagctagttactgttggttgagccagggattcatcttcattttccaaggctggtgacgatgagctagctttcgatgttagcttgagcaaagtcgtctctaaatcatcctttcctaatcttctcaactgtcttgaactcataattcacaatattgctccgtgatacctttgaagctagcagaatatggcttatggtcctgccggtaacgatataatccctttggaaacgccatagtagtgatactgtcttatatatgtataatgatctgaatttatgttcatatcgaaaaccagttcacgtgatctacaaaagaaattttccaatgtcttgaaaaatttggtactagtgatgctcttaccttgatcttagaaatatgaagctcatctcatcgacatggaaagagagtccagtcatgagtagacaaccagtagactaggttgccccaatacaagacaataaaacaagcccccttttgagcaagatggcgaagaaaacagtgagacagcaggactttatgaagcgtaagcttaaggttggaaaaccaaagcagaaaccaagcaatgtgactgatacatctttccagatgaagcgaatctcgctaccatcacagaccaagatcagcagtggttccaacgggaagagcgctggaaatggtacaggcgtattggatttgaaccaagaagtgataaaaagagtcagcttgttgagacatcatagcgatgtcacgaggaaagaaacagtactatatttcgaatctatgatctcgaggatcatccatctaccgagcatgaataatctaatgcaatcatccatcccattgatgtgtgattcatcaaaacaagtgcgcgacgaattggccaacttgcttgataccattgggaagcacgatgccaatgtgttgaaattacagatcagagccatcacattgtatttgaacaacgctatgacccatataatcgctcctatccaaagagactccggtatgttcgtacaagtggtgttaaagtactgtgctgacgagctagtaaggcacgcatggatcaagatgttgaaagggtttttccaggtattgggatggaccatagtcacgcaagggaacaacaaggcaaagggcaagtcgataagtatggggattacaagcagcagtgtattgagtatgaacaagaacaagaagcataagaacgagaacctgaaggcgatgttgcaattcataagagctggagtgctaggagctgctgccattggtcacgaagacagaaaccccgaacagggtaacggtgctaattccgtctccccactattacaacaaagatatgtaccgtacatgataccggagttcccacaaccgtatgcatacttgaaactcttcacgagacaatttgcaaaaggcgaattgaccagtacaggtgctgaaacaagtagcaccgacagtggaaatatgactctcgaggagctagaaacgttatcgtgtgaggatacacacacaagaagaatggtattcaatcaacatttctatccaagcatacaaaggcaactaccggctctcatcaaggacggaggggagtgtggccgtacggcccattccttctccagcactttggaagagattcttcaaatcactgtataataacaccagacgtaaatagattctgaaaaagaaaaatgctactgcaggatttaccgttttcccagtggtgagattctagtttcagacgcaatacgtgataaccttgggttgttccattaatatatagtatactaccataaaattattaagactgggctgcaactactgctgcagccaactctaatcaccgatgatttaaagtgctcggttgctatccagtgtccttgcctttggatattcctcaatagcgtaccaaaggaaaccaaaaaaaataagattgcacaaactcttctcttatcgacctgaagaaggcctaaccgataaacaccccaacctcgaacactgtgcggatactgtgccccaaaaaaaaaaaggctcgtaaagtttcattcaacaaaacatgatgccactccccagtctatgtgacttgtcctgtagacactcacacctctccgtgtgaatatgcacgaaatcggtgtgccttgttctctttggtatcactgcgaaacgaaatttcccacacaccaaaaaagtgtgaaaaaaatttcaacgtttcgaattcccaagatgtttccaacattaatactggactgtaaagtgctgtagagtgctgtgatgctgtattcgtccattattacaagcctagttaccattcttggggattattacttagtaccttgccttggaatatatataggcaaaagtatttatatatagatatagatatagatatagatatagataccgtattcacgttgcctcatttcccaattgatagtagtaggctgggagtatatacaaagtacacttcactatacaagtactatcccatatatcgaagctttcgtcggttgtaaccagaattgattttcctttataacggacgagtcttatagttttcctatttttctttggatcatttactataggagattttgaaaatttagttcggaatcttaagcatcttctaaacacaattcggccaatcccttgaaccgataaaagaagagatataagcctgttcattaaagaaaacagaaccagaggttgtgcgaaacgtatctgttggctagtatagagttgattaccagctttgttctctctctttcattttttcagtcccatttgtttgatcttttagttgcctgttttttttttttacctctttattatcttttccttttaacacatcagcttcatcctttttttgactggttcaaaaaagacatcatacagcagctcatatatttggtaccatcatcatgtcattttccatgtctggacactctcatgtgaattcttacggttcaagtttgaatgccagttctaattcagcttattcaaacgtttcctttagatcaaactccgtcccagattcatcctcatcttccatgtcagtagctggctcaggtcctattcagaattctacacagctttacatgggtgatttgaacccggattggacagagaacgatattaaaagtatatggtcgatgttgggcgagcccaacgtgcaggtcaaattgatcaaatcgtcaaatccaaataaatcacatgctgttaacaattcaggctactgtttcgtggagttcccgaaccaaatggcagctagcaatgcgttgatgaaatcgggacttcgagttcctatggattcgaattatgcgttgaagcttaactgggcttcatttgccactgcgccaggatctgaattcactcttttcgttggtgatttggcacccaacgtcacagaagcgcaattgtttgagttattcatctcacgttactcctccacattgaacgctaagatcgttttcgatcagttcactggtgtgtcaaaggggtatggattcgtcaagtttgtcaatgaaatggaacagcaaagagcgttagtggaaatgcaaggcacgtttttgaacggtagggctatcagagtgggcacaacttctaagaataagcagggccagcaaccacaacagcatcatcatcaacagcaccagcatcagcatcaacatagattcagtggaagcgccgcttccagttcgagtcctggtgtctcttcttcgaactatagtaccaacgctccttcttcacatatctccactccaacatcacaagctactcctgctaactcgggaatgctccaatcgaagttctcgtaccctgtattacagcagccttctttgtcgcagttcactgatcccaataacactacggtgttcatcggcggcttgtcaacattgattactgaagatgaattacgttcctatttccaaccttttgggcaaattgtatacgtcaagatccctgtcggtaaaggttgtggttttgttcaatacgtcgatagaattagtgcggagactgctatctccaagatgcaagggttcccaatcggtaactccagaataagactgtcttggggtagaagtgcgaaacaagctgctgccatgcagcaagccatgacgttagcgttgcaacagcagcaacagcagcaacaacagcaacaacagcaacaacagcaacaacagcaacagcaacaacttcatcattactcctatcaatcgcagccagctatgccaagtaactatgcttatactttggactcattgcctggtaatgattacgttcctatctctcatggctcttccgcgtaccagcactatcactcgcaatctcaacaacaagtgcctcaacaccaacaaccatcgttacttccatcgtacacctcgttggagtataatacttcaggctccatgaacagttccatctccggttcctctagttaccagctgccaatgggttcatctacttcatctctaggatctatctttgctaatcaaaaaggtggtactagtatttatcagcaaaacatgaacctcaactcacaacctcaaaataaccaatctccattgttcacttccagtttgagaccacaactttctccgcaatctactgacctttacacccaaaaacaagtggatgtgatcgattttttggaacaaggtagtaatggtaatggttatatctttgcttgatttttcaattcatttcttaagcttacaacacattcttttttcaattcaaatttaaattcaagaataggaaaggaccttttattcaatctttcccttttttgtgttgtttctgctgattcaccctcatttttgtacagagttccatttttgtatctattatgattgaagtctgcagctttaacacggaggaatactcagcgcaagatttatgttttttcagtcaatactaatagtgataatataagggtgattatattaaagttcaaggtctgatctacgcgtgacaagtaaatgttattgaactcttctaaagatcttcgaaactgtgaatcatatcaaagttcgatctttactgcattctaagacaagtccgaaaacatgcgtatataccattttcatttccttccatggatcgatatgatggtcttatatcgattaaaatatttactagtaactgagaatactgaatccctaaaaccaaaacactgatttattgttaattcaattccagtatcatcagaaatgttaccaaggccattttttgaacttaatctcatacaatttgtttgtttgtttctattttctttgtacgcattctacctccgcatttgtttcccactttccttgagactataatgagtggtagtaacaccaacatatgaggttccaagaggaatttcaaacacattattattgtcgcttttgttataataaaaccaagaaaaaaatactctgcattgaacaagaggaacaaacaattcataggaatctatcctattataatgtttttttttcacctccgtcaaagacatgccagttctcattcgaattatattcttcctttaattatctatcgcttcctattcgcagtttttcactaatgatgttttcccttttttgctcaacttattttttgttttcgttacagtcatgttattattttactctcaacaacaacaacaacaacaacaacaacaacaaccccatctactcacagaaaatatgccattccaacacttatatcttaacgcataagataactatatctataatatctatatatcaaacactaatatcttttattgctttagatttggaggtctatcgattttccctaatatgtgcgtacaacaaattagccgtggcgaaaatggcaaacatcgtttctattctgtttcccatttgtttctggttaccatgttgttgccaattccggttcttcctcgtgacgatgtcctgcgtcatctggcacgatatgacttaagatgctgctgcttacataacacccacactgcatgctaattgttgttaaaacacaaagacagatatatttaatacccagcctagcgtaactgaaaaccatgccacggaactagtgattgagatcttcccagatccaatctgccatcctcttgagaagaagaaatttttggtaaggtctaccggggtccttaacaccgaagactttcttttgactgcccttctgaaagtattacaccgtcacctggcaactaatactgctagatgcaacattaaatagcctttgcacattggattatttcaatggtttctgtgtaactataagcgcagtcttttgcctgtaattattaacgtattatcagcagcaatttctagtgattttatcggcgaaaactctccctggcaaaattctttaccgtttacataaacgggatatttgaccactctatagatcaactgccaagcttctgatactgctactttcagtttgcttttctctgacgttttactttttaatcaattaatatctgtcacatccagttttgtcaacatgaaaaattgtttgaaatccattaattaaccttggaaataatgacagaaaaggaagcgatgagatgctatggaagtaattaaaacattgataaccccttcactttcaacatcttctgaagagtccgagtaataatttttttagtttaaaggtgagggagcaatgtctaagctgatagtacgaccagttgaaaatgcgagtaattttgccaaagcacttgtggaaagtaagaaaccattggtggcagatcacggccaactggcgcgtgatctcaattacggaaagtacggtaccacgatgatcaagcctaatccatacaagagagttatatcacctgaacatcataagttgagaggagtccttggaagcgtgcgaatgtaccagatcattaacaaattggaaagtccatatgcaaaagtttacaaatgcccttatttctctttgcacttctatccaccagggcatttcatggggctagctaggaaaagttcaccggcggtgcacatacactatcgacaaaactatttattaaatgggaatttaccaggtggaaaatctcttgaggacaaccttaagtttttaaggtccaagtcttttggtaggatttcgaataattggaacaaagtactcggtaattccaattcattaatacctagacaatgggcatactttcgagtcgctgtgagaaagctactgcgacccgtgttttatgaatcatggaatcaatacaatgccccggacgggctatatttgtataagattgagattttctccgataaagagaacgaacaagattacaaagaacatatcgagaaaagcgtcaaagaagtttctaaattggatttgaataaatttgttttaggaaaagatggtgaaaactggattgaagaggcaaatagccgtgtaaagattaataccgtgaataatcttctacgttctgaaatggcacattttcggtacgaaagagtccccgcccaggagaaaaagcaaaaggttaacaactgaggatcatttcgttatcaaactgtggaatccttttaaccaagttgaccgtttgactttgttagccttccgccagacttatatataaaggaatgtcaaatatactattactttcatgtatatatacaaatacataaattgagggaagctagctaatacacactgagattggtattattcatggagatattattattagtcaagtgggagttgaaagtttaaaaattagagttggaacatccttttattgaactgaatatgatggaatgaaccagcagtaacagcttatcaaacctttttttgtgtaattgctcaatgtctttgctttttgattaatagaatctcattttggcatttcaagtaccgcgttctctgtctataattaacgtctcttacccttaccacccttacctagagatgcttcttcctcagcaagtaaggcttcacgttccttcttagcacgaagcttctcttcctttttttgttcttctagcagcttcttggagctagttttcttggcaccatcttcccatttcgacgcctcttcagcttcccgtctctctctttctgctctttctttagcatacgcttggtcacgctttcttgctaacccctctgctttctttgcggcagattcactgaatctcttacccatgttttttatctatatgtcttgctttctccagtgggaaaagattctctggcacaccctttctaccttaacaccaatgataaatcgcgagtttatatggacgtaggatacagtaacactggaaaattacagaaatttatccagttaatatatgtttggaccttttacttttcgacgctctatatctctagttgcttgcttgctcttctctttattttacatattctcttttcatcctttatatattgaaaatcaggttccactgctttcgaagtctctaacgataagaaacacctgagcttgaggtttgaaggggccggttctgggacacttgaggatactataaataagagtcgattaagatcatggtattaaccaacaaattacgaaccaagcatattaattcgttgtaacttttaaatctgtgtatcagtttgtgtactagatgacgtttctgtataacactaataaagtgtcaaagagagacagtgtgaagtaatgtgatgtgtgggtgttggtagacttttaacccaataatatcactcaaggatgtgttaatactctctccaagtgaacactatagctagctgtgtacattgggtatattagacttctcaggaacatgcagaacagtgtgtgtatcttacctgtcttttttccctttatttttatagaaaatgggtcgattcgtgcttacttagaatcaagaatttgggtttcagccattttcgccaactgcgaagtacatcttgtaaagatgaagaaagacacagtatcagtatacctattgttcccagatctgtcaggggtaagcattaaaaggagaagttcacgtcttttcataaggacgctcgaattgtggtttctaccaactgattttctagtacggttaaagacgtatatttttaacagcagcttttaaacgccagggtttccgatatcgataacgcgaatggttccggaaaccatacgctatgcctcgtttgctccgtaggaaaagggggaaagatgaagtattggatgttaaccattcccgcaattcattaactttacaagttcaagtgcatcaagctcggaatttcacgataaatgaagctgtttgcaatccattgtgcttggtaacgttcaataacgttaccaagaccactaaaaaagtaaagaatagcactcaaccacaatggaaatcgactttgaaattgaagctatcgaattctccgttatctcaatacctacggttaattatttatgattctgataacactaatttcctatacttggcagaatgtaagatttcaattctaactttgttcaggactagtagaacccattttaaattcactaaagatgcacagtggtatcctatgttcaataggaacattttgagggagaagaatttgtcatggatggatccgaaggcactgccgtataattttggggaattgcaattatctttcaaattgacttctagtaacaatgatgactcggatacattgacaagcttccatctgtggaacacgaaattgatgcataatgttgattatgaaattatgaagaagggtgtatttagcgatgatgttatagaggatgaattggactttcaggacgtcttagatgagaatgaccttctggacgttttaaaggttgatgatttggatcaagatatggaacttgccatggatattagtaatgaggatgcgttgagcgtagatgaggaaggggatattatgggagaagaggaggaagcagcactcatagaagatcctgaaatattcgacaccatcggtgccgtatatggacttgataccgtttcgttatcttcaaatgcctccgtatcttcttcctcatcttctacttcgtcatcgatttcagaaacaccttcgatatcatctctgtattctgttgaaaagggtatggatgaaaacctagcctcgttgaacgagtttcatatttacaatggtttcgattctactccatcattccctcgtgaatatagtacgccgaacgaatcatctgcatcattgactcaagatcaagatggcttcagggatgaagatgataaaaagttactaagtagaagaaggaaacgaataccaaaaagaaaaagatctatccatagttttgaagtatcaaagagagaacattcattgggtgtagtagttatgaccttgaagagtattacaaaccttccattggttaagaagaaaatgtcaaaaacaggctatgatatggatccgttcgttataattacatttggtaggagagtgtttaaaagctcttacaagagacatactttgaacccggagtacaacgaagtttgtgcatttgaagtatatccagaggaaagacacttcgaacttgtccttaaagtacttgataaggatgccttttcattccatgacaaaattgccactgcttcaatatcttggacttcattggtgggaaagtaccaaataggtgaaatcatgaatatagacttacctttgaacctaaacaagacatcagacgaacataattctgttgcctccttgaatttccagtttttgccatacagcgagttgaaaagacacttctggacgaactcattagattcacttacaactcaaaaagattttgacatagtggaacttggtatgttgttggaacaaataggacaattcacatctaatgaaattaatgagttctttcatttttacaacaaagtgccctggtctcgtgagaaacttacaatatctgagcttgttgtctatttagagaattggactgaaaataataaaacttcttctccgttcaacaatatacaaacgtgtcccctgtgtggtagaaaagttcacaaatctagaaatgttgtgaattctaaactaaacaaggaaaacgacttgattgcccactttgcgatttgtcaattaaaaagagcacactcaagaagaacatttttgacaccatcatacgtctccattaactcagcatcgcgcaggtggttctcaaagttcttaatcaaattaacctatgggaagtacgctttgggttcaaataatgcaaatatcttggttcaggatagagattcgggcatcattatagaggagaaaattagtgcacatgtcaaggtcggaattcgaattatctataatggaaaaggtgttagatcaaagaaattcaagaacttgttgcgtaaacaaactatcaaacaggggaaaaagtttgatgcaccatcttcggtaaaatatattccatcattcatcaggttccattcgcttgatatgagtgaatgtttagaagtcgaatacaaatcatttaatgacttcttctacaggaaactaaaacctggtagcagaataccagaatccacaattccaggtatcctgctttcaccagcagattgcagggcaacagtgtttcccacagttcataaagcacaagaaatttggatcaaaggaagacagtttagcgtctccaaacttcttggagattgtcctcataaaccgcagtttaccgagcacaactctagtattgcgatcttcagattagcaccacaggattaccaccgtttccatgcaccatgcgatggtgttgttggaaaagtatataacatctccggggaatactacaccgtcaatccaatggctattagaactaaacttgatgttttcggtgaaaatatccgttgcatagtgccaatcacgtctcctgaatttggaactattctatatatagcagttggtgccatgatggttggttcgatcatattaacttgtaaagaaggtgacacaatcgtgagaggccaagaaatggggtatttcaaatttggcggttctaccattatcgttctcgtccctcatcaaaaaatcttctttgattcagatcttatcaaaaattccgatgagatggtagaaacattgttgaaagtcggaatgagtgttggccatatcccatctcaaccagagcatccaagaataaagaaacacattgaagacaaagtagaaatcgaaaggatcaaaaggatcattactgtcactgacgaaaatgtgtctgctttaggatcagttccttgggaatacgatcagctcaaaaatctctcaaccagctaattaattttcccatccgaatccactttgcaccgtcttcatcgtccttgttattgtcaattcaactgtattcgaaacttttaagcttgcgtttctcccatattcctatataattccatatatatatatatgcatatacatacgcttacagtcacgtgagtggtatttcttccattgaaaaatgttatacgcgtctttaaagacgttttatttatttgatgcaattttattagatcgacaactttgatgatgaagctgcacaaggaactaaggtacacagagacggctgaacttatcaatggattcattgttgaaatcattctcgtatgttttttgagtttactttagtaaatcacttttttggcttaaggtaaagtactaacgaataagtcacaattcagtcagcaaagaagcgaagatgacattcaaaccgtacgaagttctgtgaatgtcaaccatgacagacctaatgaatacgctcttgatatgaaaaataggaactatgatatgcaattctacaagatgtatcaatatcgacttaacgttttaagaaaccgtgtggagagctgttgccagtcgaagtggaacagcgagttccgacttcaaggtagaaaagtcgtcaaaaaaagcaaggtattagatatacaagctggggaaccatgctggtgtattggcactgtgtattgtgaaatgcaatacaagccgaacattctgcaggaaatcgtcgatgacacatatggcgcaccagacttaatcaagagctatacagatcctgagggtactgacgagatcatgttagatgacgaaagtggtcgagttatcttggttggtgagctggtaagaaaaacaccttttgtgagcggtacagttgtgggcatcttaggtatggaagcagatgcaggaactttccaagttttggatatatgttatcctcaggctctaccgcaaaagtcacttccaccgttaccaggaaagaaaattgcattgatatctggtatcaacgctacaccaagaagtccaattttatctttaaggatgcaattacttcaggatgctttgaccggtgaattaagtacgaacagcggtctaaatgaagtatccagatgtatcattcttggaaactcgttaaaccctggggaaaatcgtcaagatttaccaggatcgctgagagaatttacaccattcctatcgaacatattgaaaagtttacctgtagatcttcttcctggagagaatgatcctagtgacaggagcttacctcaacagcctttacataaagctcttttcgatgacgcattgagcccttattttgatctagaaaatgcagacatctttcactctgtttccaatccttactggtttgatatagaaggattgcagctgttggctacaagcgggcaacagataaacgatattacgaaatatgtcattccgttttatgaagaaacaaaatctctaaagggggacacgattgatcacagactcgatttagccgaagctacattaaaatggcaaaacatagcaccaacggctccggacactctatggtgctacccatattcagacaatgatccgttcattctcaaagaatggccacatgtatatataattggaaaccagccagaatttggctatcgcaaaactcaactagagggagcagtggaggtgttgatagtctcagttccagagttttccactactggacaatacctggtattagatttggatagcctagttccagaagtccatacaatagctgtgtgactttatagattattatttacatggattaacttcatctgtactatttattattcattatgaagtctgaacggcactctttgtatcggaacctctttgtgtctctgattcgtggtcatgccataagagtcatcagagccatagctagtataactcaaagtccttctatcagagctaacatctaatctgtttagtagcctttcggcaatgttgggaattattggttgtgaaaagatcaggctaatcctggcagcctccattgcgctgtaaacgatcaaatccttttcaaggccctttttagaccaaggttcggttgattgaataaaactgtttgcttcgttaataatgttccataagattttttgggcgccagttatatcgtattgctggaaacaattgttaacactctcagtgcagttgtctagactttttaataaagcggtgaattcagcctgagattccttagggaagaccgaacttagttcctcgatgggttttccagaaaatagttcaactcctgaggctagagagaatttcttaccgccgcaacggtttatcaagttacccaacttcgagcaaagaagctccctggtttcccacaggtttttttcaataaagtttccatcactttcgatattagagttctcaagtagataccatcttgttgtatctgctccataatatgagataatctgaataggatccaccacgtttccaagacttttactcatcttcactcctccacttagccaatggccgtgaacaacaactctgtttggtaaaggtaatttcgccgccaacaagaacgcaggccaatatactgtgtggaacttgataatatccttgccaataacgtgttccgtgttttcccaccactcttttggcttttcgataaaacttctgttattgtgcaaaacttgtgtcgagtctacgtcatttctaattgcatcgataccaccaatagaggtaaggtaattacatagcgcatcaaaccacacatacactttttgagattcatcctctggtacgggtataccccattgtagccgagtcgcaggacgcgatacagatatatcccgcagttcattggattcaagttctctcaggatttgcgaatgtcttaaaggaggataaatgaatgttggattctctcttaataatttgatcaatggttcttgaaacgctgatagcttgaagaagtagtttagttcagattgatatgtaacctcgttcctagattcggagttgatgtatttagcatcaggatcgaagctaccgtcatatggtattggtggaccgtcgatagtcaactttaagattttcgtatctggataaaatgtctcatcagaaacagaataccagcctttatgctcccccttataaatgtacccgttattgtagcataggttccagagctttttcacattatttacatgatctggatcagtggttcttatgaatctggtaaacttaatattagcgtccttgtctaaatgaacgaaatgctcgcacaactcatcaacaaaagctttgggattactgtaacctttctgctgagcagccagttgaattttcaaaccatgctcgtctacaccggtcgtgaagcaagtatcctggccggcaagtttcttccatctattttgcacatcacacagtagactgctgtaaaggtgccctaaatgaggttttgcattgggataaaatattggagtggtaatgtgaaatttcgataccgctcgtaccgctttagaagtcatacttggcaagtgaaagagttgctagttgttgatttcgttctgcagtgtttattcttgtttgtcttttctcataatgttcggtataaagatattttcagaggttttgttaaactaaaagtcagttttcctacgttagatattcgatcaagaaccttcacttaaattagaaaatgtgaacggttatggaggcatatatacttatttgattatgctaatacatccataaattagtacccatttgctggaatatctcccaacaaaagtgttaaatataattatttagtgaacaaactgacaacgtcctcatcttggattttatgatttagcccacatttctgtggggaatgcttagccgatgaaccccatactaaggcgtacttgaatttatctttaaaatctctgtgaatattgtggcaaagatcacctatggagctgttactcctaacaaccaatgggtctgagaaatctggctttataccacgcttctttgtatatacacggttcaaatttaattgataccagatttcatctaccacgtcatccaatcctaagtcatcctcacatgacatgaccactgtgtttggttctcttgctagtctatctgcttcttctaatgagacagcatcaattttgttgtacacgtagaggcatttgatataatttctatgctgttcgttaagagtatcaatgaagtcatcaatggtacattggtcatcacgcactaagacatcagcattatgaatacgataatccctaagaattaacttgatggcatcctcagttaaattggatttcgatggggatgtaaatgtgatctttataccaccggtttctttctttttgaagtaaatgttcggcttctctttattcaaacggattccaactgcctctaattctttttccaatgattccctttgatgcgcacccttcgtagcatcaagaaccatcaagattaaatcagctgttcttgccgtggacaccacttgtctaccacgacctttgccctgagaagcaccataaataatacctggtagatccaccacttgaatctcggccccctggtacttcaatacacctgggacggacgttaatgttgtaaaagcatagtgtgcaatttcagactttgtggatgtaatcttacccaataaagatgacttaccaacggatggataaccaatcaaaacgacacgagcatcgccagattttgcaacctcgaagcccgatccaccgccagaaccaccactacctgcctcatctgccaaaagttgttgtctgtatctagctagcttacccttcaataaacccaaatgatgctctgtagctttattcttttgggtacgggccatctcttcttcgatggccttgatcttatctataacacccatggttgttgttttattatgtataaatcaccgattcttccacctctatttgtcaggagcaacgctactaaacttcactcagataatattctgacagtctgacaatatttaatttggtattgccctaaaccctaacactttgtttgggactaaaagttgaaagcttctctcaattcatgcgatgcctttctggttctagtcgaagctagttttttctgtcaaagacaaatactggaaattggttaaatgtaaagataaaaatacagaaatgttgaataggatagataggatgctattaggaacctacatttggttcttttgtagctagtaaagtacttaaagcaggtttatgaggccattgaaatcataagtggcttacacagcttaattttagccatttgaaacagacataacacccttacattacatattaattcgacatgtttttccaattacatgtcaaccaccatgaaaaaaaaaggaaaacaaaagtttgaatctgaaccttttctattgccgtgaaaacaatgaacaaagcagacagataaccttgataaaagccaagcaaatccagcatatatcttaatacgttgagcatcacaagcaaaattgcttgactttgtgtttttgtctttcctctcctggaccaataaatatcgaataaaagatgtcatatcaccaaccttcaattccctccattgatgcaaatagtaacacgaacgggttttaccagccatcacaacagtattcgttccctcaaggatctatggcttttggaaatgggatgcagggatctggcatggatttcggtggcagtaaacctagtggtacgccagctaatttcacaaatgagcagttgacaccaggtctttttaatgccttatctacccgtgggtattcattcgaaccttctttgcttgaagaattgggaatcaatttcaaccgtataattgctaagacaaaatttgtgttagtaccgctttctcacaaaggtttatcgaaagaaatccaggaggattccgatcttgctgggcccattatcttttggttaatgttcggaatattattacttacagcagggaaagtacattttggctacatttatggtgttgcattgtttggttctctgtcactacatacacttctcaaatacatgagtgatggtgcccatcaactgcaacaacaagcttctgctgctggaccatcctcctccggaatctcgtatctgagaagtgcatcgattttgggttatgctttcctaccactctgtgtgttggcctcacttggtgtatttgcgaacctcaacaacacatttggatacattctaggactattgactgttctgtggtcaacctggtcctcatctggactattcactgtatcattggatcttcacaacgtcagaatcctaatagcctacccactgctaatcttctacagtgtatttgctctcatggcaatcttcgtataaaataaaatgacaagaattgacatgtaatgacttcttacatctttctggtcccattcgcaagataaatatgactacatactcactagcatgaaatagattattatcaatatcttcaaattgatccagactcggcagtttcccttaatagtgagacaagaatgcaagggtcgacgaggtagtgctgatatttggattggtaatcaaaggttgcagacagttgcatcttcctaataatgaggttttgtctttcttccgttattcgaatatgggaataaattagtacgactgtttcagaaagtaccttgacagttaaatgagcatatttaaatgagagctttgatagtacaacaatatgctttttgcgaacaataataacaaagactgccaccgccagcacttgatatcattagtaatgagtcggaaataagagagaaccaatttccgtctgcatgtataaataggaaccgttacatcaagtatggttttcgggatttcggttagtgtcagatacaaacatatggagcatacaataagcataaaagacgcaggaatacagtggcacatacatcgtaaaaacttattatgagcaaggagattaatgatttggtaatcattggaggcagttatgccggcatgtcagcagcacttcaattagttcgtgctagacggaaagtggtgatcatcgatgaaggtataagaagaaacagatttgcaaaagagtcgcatggattcttgggcagtgacggtgcgagccctaatgagatagcagctacagcacgtggacaattgttgaaatacccaacattacaatggatcgatggccgtgctattagtgttgaaggaacgaaagacaatttcgtcatcaccactgcagataagcaggaataccgtgcttccaggatcttgctagcaactggcatccaagactgcttgtcggatatcgaagggctcgaggaaagatggggtaagtctgtttttcattgcccatactgccacgggtacgaattgaatcagggaaacattgcagtaattgccacgtctccgatgtcaattcaccaagggttgttgttgccagagtggggcacaataacattctataccaatggtaccaagttcggagatgatatgctcaatgcgttggaatcgaaatctatgaacgttgtccacggtatcgttcagaaaattgaaaatgaggcagacgttatcctggaagacggttcaaaagaatcattcactgggatctttgtttccactaccgttaaaccgaccgctgatgagttaatcaatcatttaggctgtgatatgttaacgaaccccttgggatctatcgtgaagacggatgagaagaagcaatcatcaaaaccgggggtttacgcatgcggtgacgttggtgtatttccgagcaccgttgccttagcagtaggtgacggtacactagcaggattcaacattcaccgctgcttattggggatgtgaattatgtttcacgtgaattgcttctgccatgcggtacaattttaaatataattcaacatcgcactatggttgtgtggccgagcggtctaaggcgcctgattcaagatacctatcttaaccaaccttacagttgggaacactcaggtatcgtaagatgcaagagttcgaatctcttcgcaaccattaatttttttttagtcctttcaaactttttttttatgtattctgcagtatgttcaaccataatagcattaatcatagcttcctgtatttgtgaaatattccgccgggctggaaatcaactcattcattcatcatacctaaggaaacgtcacatcatcagtcgcactctgttggataaggtgacgcgtaaaacagaaattgcaattacaaattgtaaattttaatatattctaaaatgtacgcgtattactgtagtatccacgtagtaatctcgaaacataaaagccataaaatcaggtgtcatttacgcgtttgtttacatttgcaatgtttactaaacactacattacaccatacttccccgtcatatgccgaagccacccccttaactggcatgatcattactcaaaggcaattagggatgtgtgtattgcctcaaaccaaagcaaatacgtttaggttttagttgtacaacggtttgaaacttgtggtattatgtcacctcgtatagcgcaccctcttcccgagaaacacctaactctactcccaataccagtagtgtattgacggtttcttatacaaccatttacataatgaggcccattttatattcatgcatcggccgcagctgaaagatggtaatagcagatatactcgtagtagctgctgctgcagcagctgctgctactaccactgtaagtttgctggctattcctactcttcctgcccctaattcctgcccttatcctattcacaaacgcgaaacgcgaaacgaattaattaattttatttaattttattcagatttcatctgaccctacaatttgcaattttggttttggttttccttctacagtagataccgtaatccattgtcagaagatacggaaatgagaaaaattttcctccgtcagaacaagaaaggcctgcagcctgtagtttgcgaggcagatcagatcagatgagggcaggagaagtctgattagctgtgggtcgttcctttctttttaggttatcgagaagtagtatataagagtattaaaatatgccgaaagattcttggatcctgagtgtcgagtggcatcgcatgatgtgttatcagaataaactttgtatgatttaatataagatagattcctttttttttcactgataaaaagtgtttagagtaaaagcatcgtagaatcatcgcttctcttctgatattatatatatagaagaaagaacaaggaaatatcttcaagacagctggtaccctttttctgtctcgattcaaattttaagcttacaacacgtacggctatatcactaagactaacataagatcaagtgaatgtcacctataatgaaggaaactccatcaaaagcagccgcaagcgcactttcagatttagaacttggcgaagccaagaaggatttaggatcccagttaggagctgttaaagaagagactgctgctgatattgatatcaagattgccaaggctgtagaagaacacaagaagtttatcaaatctcaccatgtgcatcgtcataaattgaaggcactagagaaggatgagcctttgctagttgagaataagcgtcgttttgttctcttcccaatcaagtaccatgagatttgggaagcatataagagggccgaagcgtctttctggactgcagaagaaatcgatttgtccaaggatttgcacgattggaacaacagaatgaatgagaacgaaaggttttttatctctagaattttggcgttcttcgctgcctcggatggtatcgttaacgaaaacttggtggagaacttctcagctgaagtgcaagcaccagaagcgaaatgtttctatgggttccaaattatgatggagaatatccattcagagacttattccttgttgattgatacctatattaaggatccaaaggaaagtgagtttttgttcaatgctatcgaaactatcccacaaattaaagaaaaggctgaatgggctatcagatggattcaagatgatgatgccttgtttggtgaaagattggttgctttcgctgctgtggaaggtgtgttcttctccggttcctttgctgctatcttctggttgaagaagaaggggttaatgcctggtttgactttctctaacgagttgatctgtagagatgaaggtctacatacagactttgcctgtctactctttgcccatttgaagaataaaccaaatccagaaattgtggaaaagatcattacagaagctgtcgaaattgaaaagagatacttcatggatgctctacccgtttctctattgggtatgaacgcagacttaatgaaccaatacgtggaatttgtcgccgacagattattggtcgccttgggtaacaagaaatatttcaatgtcaccaacccattcgatttcatggaaaatatctccttggctggtaagaccaactttttcgaaaagagagtctccgattaccaaaaggctggtgtcatcgctaagtcttccaataccgaagcccaggatggtgcttttgcatttgatgaagatttctaaatcttgtttgttacggaatcttttctatctcttctatcccatgcggaatatctttgtcttcctttctcttacgtatatcattttatcatataaggtttttagtttactcttttcatataactcactaatgttaatactttaatgcactactcctcgcaatcatctcttccgttaggaatatgctacggtactgattataactacagctcatcttcaatcaatttggatctggtagttcgtctgttccttgtaaatagttattatgtcaaataacacatagaaaaagagaatgatagcaatcagtttttcgcagtgaatgaaggtaaaaatgcagcggggagagacgcaacctcaaactgtaaggactgttcattgctagctttgggatatgtccaaacgatacttggatgatgtgttatcacctgacactggaactagcgatagtgactcttctatcgaaaatctaaatgctgataattatagaatagacatcgttaatgacaatgcaagacgcgatgacattgatagaatacagagttcaaatcttaaccatgagccgccgtataatctagaaggtgtatttgcaatagatgatgacgaacatggtgacgaaatggtacgaaaggactcagatcgcaggcaggacataacagaagataatgatgattctttcgttcccgatataactacacctccaagagaacgcaagcgcgtacgattcggcatcaatgaaaagggtggcgatgaagaattcaataatgtcagcccatgggatttcaagcggctgatacggaagttttacaaagaacagttgccagatacataccagataagaaattggaaaagaccttcaaaggatatgttaaccaatttcatcgatttgattgaaaacaatatagaattggcctctgaggaagtattcaagcaataccaccaagaattgaatcaattatatcctgatagcgaagaacaggctaagttgaaggatagccttgagaataaagttttcgataccacatataatataaagaagaggttaaagaggacaaaagtaccatcaaaaatctgggtggataacttgaatatggaatatatctatgcgaaaggtgaatcaatcaagaaaagatacaagtcagaattggacagagctgaggcaattgagaggcaattgattagagaagaagaacatctaaaatctctgcaagaaaaaggtgaaactcaggccaaaaaacgaaaacaagtcttgagtaaggaattatccgagctttcaaaaaccatgcatccatcattatcagtagcgttgtcgaacacttttggtttgataaaagacgataaaatgtcaaacgagatctatcagcaagataaaatagatttcaatctaaaacttaagactgatttctcaaaacctctcatatctgaaaaggaagagaactcccttaacggtttaacgaatgcaatggataataatagagaacttgttaatgaaatctttgggaaaatatcggcccttttacaaccaaaaaagaacagcaatgagtaggataaagtgacaagtaaatatacattcactgttttgtaacatttaagagctatattgtaataataataataataataataataataataataataataataaccacaatcgacaactgacgataactacggcaggatgggcctctacaatgcagatctctcctttcgataagtaagcgtgcggtttctgattaaatagtgtgtcagtcgtccctttttacaattgtagagcaagcaccgctaagttgaaaaccaacaaggctgcaatcaataaactagaagttaaagctgttacatagcctcgatggctgatgttagggagcgtaccatcgtgtatcttcccttttatagctaattattatcgaagtgtttagtcacatcactgtatacgcaatagtatgagcaggccttgtctagaagaaactgtgtaatttgacaaattcatgaaaccctcgttttaaagatatgcaataacaaatcttgtaatcaatggatatgatcaatatcgaggccaattagtagcgactcaggtttctctataccaggcttcagcaaccgatgagaggtgcttcaaagaagagttctggttcagcaagttccagcaaatcccgtggcaatgctgctttcaatggaacatccagttcattttatgaaactgcttccgtgaagaagagttttgacgaaaggcaggactttttgctggtgaacggtattggtaatcgtgccatcgttactataacttctggtgttaagtatgagggtttagtagctgcttggaaccctcactcatctggtaagggaattggtgtggttttaaagtatccgaaggttctagataaaggtttcgatgagtcggatatcaatgctctttcggcagaattaagtgaaacgttaaccatagaacctaaagatgttgctggagttaaactatttgatgttagcttagattcggatccattggcagcaaaggaggaggaatcgaaccctgttgaatcagggaaacaggccgcagaaggcgagacctcacaaaaggatgcattcaagacggacactgctatttctggagctccaaaggaactgaaggaacgtgaattgcaaaaatggagccctgatgaatcagaaagctttccattgaataatacttctttagaggacgacaatggtacctgggatcagtttgctgttaacgaaaagaaattcgggataaagccatcctttgatgaacatttttacacaacaagaatcaataaggaggatcctgagtatcagaagaagctaaacgaggctgaaagaattgcaaaggaaattgaatctcaaggtgctagtggtaatgttcacattgatgaggatagaaacattaaatatgatgattctggactggatgaggaggacaaatattccggtgtcgatcgtaggggagacgaattacttgctcaattgaaactaaatgccaagccagaggctaaaggtgttagatacgttcctccctctctaagaagccagccacatcatgcggatcctgctatattgtcaactactggaaagtcaaagacttccactagaagcgagatcgctgacttgaagagcttttctgagaaattcaaaattccttatgatatgcctgatgaagtaaaaactattttaaagaaggatgatcaacatgtgaaggagaaggaggaacagccaccttccagtgcctccgctgtgtcaactacagcttcgactccatctcctgcgccaaagacttcaagtaccctgaaatccaatccatcattacctcctaaaccagcctctcaacctccaaccaccccaactttggcaaatgcttctggcggcaagggttctaacagatcctccaaagcgggaactccagcattgggcaaaattgaagttagaagaggatctcaaaacaaattcaacggtagtggaaagactccaattgcatctccatctatggctagggcagagacatttggtagaagacgccaacgtaatttctttgatgaagggaagccaaaatgtttgaagaaggacttgaacaaaaactttaatatgttcttaaaggcaaaagaagcacatgaatccaagggaaaagattctgaaggcaagaatttggaacgtttcttcatcgaaaaaccatatttcacctctcctacatgggtgagtactgtcgatcagtcatacaaaagcctgttcccggatgagagaactgcaattcaaagaactcaaatgagattgcagcaacgcagcatcgacatgatggctcaaggtatggctacaggccctggaggcatgcctatgggtatgcccgttggtgtaccaacaggtggacctcctttcatgggtggccatccgggtgcaacagcaggatcacatggagggatgtttatgcccttccaaccacaaccaatgttctacccacctatgggcggacaaatgatgccaatgatgaacagcagaaatgacacaagaaatggatcgggagctaacagtcagtcttcatctccaccggcaactacgggatttatgaatggagtacccatgaacgttccctacggttaccccatgagatatcagacgatgggaggtccaccacttcaacaacagcaacaccagcaaaagcaattccatcagaaccataccagaaattacagacagcataacgatagtcgttaattcgaattagggctaccattaaaggattcaattgtatccacttgttcgtttaacttttacaaactcatctatactactacataatttctgtgtaaacaggatacaacaaaaataaacaacttgggtaaacctcgcagttgagaatctgatctaatggagccataaagacgctacaaaagtcatgaagggtcttttaaaactgcatcaacttttatgacttatctttgtcaagttttctctgcagtattgtaaagaagaaagaaaaatagagatcacgatcccaaggtaaagtaagaaactcaaattaggtaaaagctcatcgcattaaagtaaaggtttgaaagtatcttcgggctgtaaccacataactacccgtttatactgtattaggcgaactgaggctagatgtcaacctatataaaaggcccaatatgtggtgttgacaactgtaggagtcgattatggcgtataatagatggtagaaggacatgtcagtacggtcatgttatggaaggtgatgtggaattcaatgatgatgaggatgatgtgaatgccatgggtgtggtaactagaaggttgaatctaactacaaatgctactggcaactttcagtcaagtttaagtctttctcaatcacagaggtccacactgggatcaaacaagacagaaaaaatatatgggaaagatggacggttattgttcatcaagtgtttccagtatatcttaagaaagcagactgagtggcttatagaaaaggagaattttccaaattcttactcagatctagtaaaactgatatggactatgcatttaaaacacatcgatcctgtgttatttgcggacaataacaacgatcgtttaaatgggcatgacagcgatgaagctggcgacgatgacgacggcaataactatccagtttcgggaaaaaggaatgaagtgggaaggctgaagttgtccatgctatccagcatatctatacattatttggcatgtctacatttggggttgccaatatttacaaacgatattcttcgatggatatgcgtggatggattaccgtatttcagatctcaccatatactaccgaaggaatggcaggataaactaccaaattactacctactaatccttgacggtgggaaaccaccgtgcgaactacaacttcagcataaagtggcacaatgtgcccagataattaattttaaaacgcatttccggtccgttataccggcgcctgtactactactcagacttaccttgatagaaagactccctggggagttctacttctattctaagcgactactgcacctattatacgacaatctagaaattccaatcctaacatatgaggataatcattaccgcagaccgcaccaatacaccgatatcaaaatttgtagcgtattcatcgcggcagttaaacttcaacttttggcggaccaacaatccaaagctgataacttcgatgcaaacttcgcatctggatggctcaatatgatgaaaagaactgatgaaaacccgaaggacaaattttcaaaggccaaacttatcttcaaaatgacatactcacctgcatcttcactagtcgacagcaactccgagatacaatcggctgccaatacgacacagtatttggattggatagaaaaaaatctactctctttggaagaaactcatctggaatcaacgcaaacgcttgatgagaaaatcgccaacagaaaattgcataacattatccctttaaaggcatccccggatccttcatccggagatattgctttaattgaggacatacaaagcggattattagaatttcagtcgctatatgatcgaaatgcgaatccgggaaactattactccatattcgagatggtagacaagattacccgtgacctttctctacatttcggtatcagccatgatcagttgagggcatccacggaacatatcatacaaaatatcgaagaaactatgtaggacgtccatggggaatttatacggaggtacgtgtgcttattgatagacattgtgccaattggtcgttctttgttctaaacgtcactaaaattccgatggtagttttcacaaccactgtcgtttccactttaaacgaacgattcgtacggtctcgtctataatagaaataaaggaattgaaaaatgatgcaaaaacttttcatcaaatgtataaatatccaggactataacttccatcacctcttgcatgatatccatacgttgatatttaatacgtagtcggtctattctaaaacaacttccatcataggctcacataattgaactctttattgaattgtttttgttcgagcttcgttcccataatatgcacaaagaaaataaggtttcttaaggtttttgattcgtcaggcatcgtgcatcattcagaaacagtatttcaatatcaataggaatcacacaacgaaccgcgattctattattagtggaaaggccataataaacaaatgggttcggtgtgtttatcatcaaaaaagttagagcgcggccatgccagacgtgctggttatgttgaggaagtcttattgatggaacatcgtcaaaaactgtactcgaattttgtagtgcacggtgagttgaaaagtgcagcttctgagttgcaattggcccatgccctaagggctttgtttctaaggtatccgatacttgctacgactatcattccagagtattggaacgaaaaagagacgtattataccagtgaagcattttacaataaaccgggacttgcagaggattacgttagtgtagtagatcaattgaagcttgaagatgtgatcatgaacaagcaacctgaacattccaaattttataacgagattttgaatcaatgggaacatgatgggttcaaatacggagatgatttgtccgtggtcgtcagtcagtacactttttcatgttgggatccaacgaaaccccatttcagattggtgcttttgccttcggcagatgataagaagggagcgaggggattcaaggatattctttacatcacgaaccatgttacaagtgatggtacttccggagctaatttattggaagacttatcgatcgaattgggtaaattttctggaaccaatttgcaacagttagagtatcttttacattatggaagagactacgagcaattgccgaagttaccagacccaatcgaagaaaaagtatcttatggtgtcaatccatcgtttattgcatctttcctcttgagtcaaatgggaaagaaattgttgaccaagaaatgggaccaacccatcactcgtcctatcgatgcgtcacccgctagtcacatggctcacattatcaagattgacccaacaggtatgcagaagatgagagctagagtgaaggacaagttgaatggtaaagctacgttaacgcccttcatgcaagcgtgctggtttgttagttgctatgaagctgggttgtttgacgatagaaaatggaacgaatttttcatcaacatggcagttcctatgaacactagacaatatctacctgaagatcccgaagtaagagatcgttttagatatggtaccgttgtaggaggtaccaatttcaatttcctaatctcttcttttaatatcacaagtaaccaacaattctgggatctaaccgaatattaccaacaatggttcacgaaaactagagaggaagggctagctacaaaaacattcggtacgcttttcgccgattttgttagcaaatccaataatttggataagttaatcaaacaagatatgatgcatcagagaagagcatttgcacttttaagtaacgtcggttatcggccacaaaaagcacaagagagcaatccattccaactacaagacttgatcttctcccaagcagcatgtgaaatgccgttcgtgtttagtttgtgttgtgtctctacagatatcggtggtatgtcgcttaccctaacatgctgtgaggaatcaatctctcaacagcaatggcacaaaatttgccaagtcttcgaaaagaacttgacaactttataacgtaaatattcaaaactttaaataaaccgatgataatcctatcactggagcagaacgctcagcgaatattccatatggtccacatgtagacatgtgacgaacaaaaaacgagacagtgaaagaaatcaatccggcgttaaaatcaatcctctgtaatgcagcacacgtcgtataacaacagaatacgtgctccgaaatgttatacggtacgtctcgtccgatctaagcccttcacacctcatcccatgtctttttttatcgtattttatcgtattttatcgtattttatcgtatggcatcgcatctcatctcatcttctcgtaaacaggctctcgaaggaaaaaaagaaaaaaccacgaatcaaagctttcatagaataagaccactgggatcatgacagtactactaatagagtcttagctcttgagtgtctattgatagcttctacttgagaagccgcatctgctgttgttacagaggattatcaataaacgatttgtgcagcttgacggatattcgtgagtgctcgttccagaaagagaaaactaggaattgagaatacatatacagtgattatcgcttttcgctttcagttgtataaatataagggctaggtattttgaattcatttgataccttactcgtaccattcgattgtgattttatttatttattggacttgtcaattgttaccagcatcaactaaaggttgcgaacggctcaatattggtcatattctaaacgggacaaagagcgcctgtttatattcaaaacgctatgagtgattctgttgacgttaaagctattcctaaggagctccttagtgctagctcagaaattgtctatgatgccattgtcgttggatgtggtgtcgtaggtccatgtattgcaacaggacttgcaagaaagggtaagaaagtgttgattgttgaaagagattggactatgccagatcgtattgttggtgaactaatgcaacctggtggtttgcgggcattgagaagcctcggtatgattcaagccatcaataatattgatgctatcccagtgactggctactctgtgttctacaatggtgagaaagtttcaatcccatacccttacaaggccgatacagcaccagtagagaaaatatcggatttagtcttcgatggtaatgatagagttattgaagataaaaccgttcatgtcaaggatttcgaagatgacgacagggaaagaggtgttggtttcgttcacggtaagttcttacagaatttaagagatattgttgccaaagaaccaaatgtgacccgcctccaaggtaatgtcattgagatcttgagaagcaaagaaaacgaagtagttggtgctaaggtcgaaatcccaggtcgtggtaaagaagacttcaaagcacatttgacttttgtatgtgatggtatcttttctcgctttagaaaagagctctccccagatcatatcccctctgttggatcctctttcgtcggtatgtctttgttccatgcaaacattccatcgaagaaccatggtcatgttattctaggtacttcacatatgcccgtgctcgtatatcaaatctcctctgaagaaacaagaattctatgtgcatacaattcagcaagactacctaaagatataaagtcgtggttgactactgatgttaaaccatacttacctaaatctttgttgccatcgtttgataaagcggttgaagatggtaaattcagatcaatgccaaactcttacctaccagcaaagcaaaatactgtcaccggattatgcgtcatcggagatgccttgaatatgagacatcctttgactggtggtgggatggctgttggcttgaacgacgttgctctactaatcaagactgttggtgatttagatttctcagacagagagactgtccttgatgaattactagaataccatttcgaaagaaagcaatatgacagtgtcatcaatgtactatccatcgctttatactcattgtttgctgcagacaacagaaacttacaagtattacaaagaggttgtttcaaatatttcgaaagaggtggagactgtattagattgccagtaagtttcttggctggtgttcttccaaaaccgttcttgttgaccaaggtgtttttctcagtggcattgtactccatatatgttaacttccaagaaagaggcattttgggatcccctctggcattattagaggcatttgctatcctatttacagctgcaaaagtgtttactccttacttgttcaaagaattgataggttaatgtggttgctgaaatccatccgccaaagaaattcaaagatagaaatataaactaatgataataatagacttctgagagtaaaaaagtagcttcagattatttgatcctacattctctcataatgacttttttttgccttcgcttttatctatacatgtgatgaacgcatctgacagagatgttgaggatactaacttattcaattttaatatatacatgtgtgtagtaagcaactcctgggccacaccacctgtagttttttaccgtaataatctcgcttgttctatccgcctacagactccttcatgggctgtactaatccatgttctctcgacaaagctgtcctacgttgcgcttcttcaaaccactaacggtgattatttgtatatatatgttagttgttacccgcacatattagcttatggctaaagcctctggaaaaagtaattataacggagctaacctttaaaagtagacagagatgtggagcaacgctgagtttacactcttgatgagacagttaagagccgtatcacaccagtgaagcgttgcatttatcacgtttatttattttttagcatggagtcttcgggttttttacgctggggtaaagttttcgctgcaggaggcagtattatattaactggtgtgcttttattcaaatatacaacaccaaccgatgagcaactccttcaagcattatcaccggagttgaggctacagtatgagagagagaggaatctacgtcaagctgagcagcaagaactaatgaaagttgtacagcaaaccatgaagagtaaagatcctatttggaaaacaggaacggtcgattcaccatgggaaagaaatggaactcaagccactaaggaccagttccaaagattgaaggcagatcaagttcagaaggaagagttggaacggatcagacaggaattggataagattagaatggagagtctggaccaaacagatatgatcgtttccaaaaagagctggtggagtctgtggtaaatgctggtattctacgtttcgatatcggatttctctcgaaaccgagtttagagctcaatttgcattattttttcctcaaactttatggcggaaaccaatccatccacgttgatgaatcggttatctgaaagttactttactaaccgcctgtagatattatttatcgttgttttcgaaatcaatggagtgtatataatttttccatgagtttcgactttatttattcatatgatattattataatccactattaactattatgctgcaaggcctatcaacattaatatgacattggcgttaagatagcggggttattttctgatttatcattgatgtgacccccaagcactgaaatttgaataactgaacgcctggaacgcctcagagattcgattccctgctagtttggtgaaagaattttcactttcattagcgttattcaattcatctacagcacttacgattttccttacattggtctctatcaccaatccaccttggataatctcttcaagtacactttccaatgtttgccaattgaagattaagtctagctcattcacttcttcgaaacatttatccaatgcctctacaaacgtttgaatcaaatctaagattgctagttctgattcttgttcatcaactataaatgtgaagtataacgtggcgtagttcttgtatatgatttgaatatcttcgttatcacctgagtccattaataaagatggaggagttactaagaaagatgactgcacctgactgttacgctgagatataagttcatatacttgctgtaataaaagcgtttgcttttcaacctctacaggtgtataaaattttatcaatcttggttgacatttcttgttaactgttgcatttggatcatcattaaatgttagtaaagcttgatttctagggtattgcttggtaacactttacatacatattaatactgcatgaatcatgactggccgttgccaattggtctgtgcttgtctgttatcaaaggcaagttattgaactaccttgttcaatgatatctatctactattcttcgcaaaatatacttgtaacttctcatcatcattttaacttatttcaattgaattggcactttcgattttcaaatgttggattcatgctgagaattgtaaagatgggttttctgtacaataaaagaaaacgagtaagaaacacatcgagagccgttagtgaaaccttaccgatactattgaatttgcattgaatgaatcgaaatgctatagtggattcagtttatgaaataggtagcaacgcttgataaaaaaattgagtgctcaataaattattgaataatgaaaaagaatgcatcggccgggaatcgaacccggggcccaacgatggcaacgttggattttaccactaaaccaccgatgcctagtatttgttgatgtctgttgtactaagtttggggtacagtaacgtaatgataatcatgcgactacatatatgctccgtgtgacaagtacttggacagtggttcatattagtaagtaaatcactctggggaacttccaaacatatcttccaataacgcggtaaatcgcaggaaaggagaggttgtgaaacgggctgaaacaatagttatctatcccttccattgctgctcgatgtgaaggaatgtttcttcctcatattgaaaaaaaaaactaatgatttgaagctttagcataaactgaaatatccattggcaatctacaattaacagctataatctatcatccaggcccctctgaacattgcatcggatcaataatctatcatagaacacattaagatatggctttaacttcgatctttggtggtagctcttcatcatctggtaccccagccacatccagtcctagcgatgtcaagacccaacttaaatctcaaatctctcaagaattagccatcgccaatgctaccgagttagttaacaaagtcactgagaactgttttgagaaatgtctgaatgctccatatgctgcttctcaagataactgcgtcgaccaatgtttggctaaatatatgagaagttggaatgccatttcaaaggcttacattaacagaattcagcaagcttcggttaacggtgaaatctaaggggcgcaacttttgagataaaagaagttatttaatgctctgattcattacaagctacatgtatatagatttgtataatgttatattcgcgtcttacgtataatcatacattatgaatgctatttcatacccgtcgaataaattcaggtatatatatataaacaaaagtacggtattggtacacaaataatgggtaattcttttttattatcgtatagacatgattaatacacagaaacagcacaaacaatacattgtatttaaatacaattgagccgcatatgtgattgattgatgagatttcaaataagtgagttgaaaataaataggagtagagggaaaaacagctaacaacaaataagatgaacatcaatgcgcagatattcacgctttatggtcatatatgttttaccctttttatctcttgaatcgagtgagattccgatagcgaaaaggatgaatgttatgaaaatctgagaacatcattccaaagttgatgtcctaggcctggtagacgtatggagtgccggatagataaatgtttcccgacagtagcgtatccacatttttaaaatatgttttgaagtgacggtatattctaagaagtaaaataattgaacaaaagcatcaatgaaaagacacttaaaagtataatgatgagaaatgatataattcaaatgtcaaaagaaacttattcatcgtcttcttcatcttcttcaccaccgttcatgataccacccttgatatctttccataacttacctttgttgtggttttcgtaccaagaggtcacaccagtatcgaaggcagcttggaaaacgaaggcagaggcgaacacggtaccaacgaaaacagagtttctcttaaagacagttttgtacagagtagaggcgaaagactgtgataattaagttgttcagaaaaataattgttagtaatatgatctaatatttcatgtagtcaatccgcaatgatctgggaaaacagccgctggattttgcccagaaggtgtccattcttcacttgtttgatgtaactgatatacatgcgataagccatggtcgtacttcgaagataaatgtagtattgagactgcctttctattatatggagatatcggtcatacctccagggaaccttaacaggcatcggaaacaccacgggatatgcagacattcagctttggaagtatatttcactaataatagtataattgtacattagcatctgctcaatgtaatttgcatcgtgtttacaaacagttttttcagttcccagttttcggtttctcaattccagaagtcaaataagacatctacgccaaaatcaatgttttcagatccagaaaagacgcatatcatatgtattatccatgactaatcaaatcattaacataccatttctaaaacgggagttctggtttctgttgagctgaactttttcttattaaaccttgtctttggcatcagtcgaagttagctttccgttttatacatttatccagtttttcaaaaatttgaagaaaagttccgtactcggatataattgggtcgtatggtatgatatccagaagtaatcacgtgcaaaagtctagtactgggagtactttcaacatgaattatcaaagggtgggacagagtcaggctacaataaaagattctgtaagatattggacggcatagtatcctgtggtcagtccactccacatattgcagatttatgcaaaactagtaaaaatatcttatatcgatgtgtgcataaacgaaataacgtgctattctatatatatttggtacattgaagttgtgaatggtgccataaggttaaggcaattttgaggtgtgacgagcaaaaagttattcattctacgttatttaactcgttgaaatcaaaaccttcttctgcagaactgtattccgtgtcttgatcttccgaagcgttgttttcgtgctcttcgtcctcaccatcttcattgccgtcactttgatcattcagttcaaagtgctctctatttctatctgcacggccgaagaatccattcattgcatttccttgcagttgttcaatgatatcttctgtagtcggaatgtctgcgccatcaccttgcataccccctctcatgttttgaacaaactcgaaaaaatcatgtatgtcacctctttcggttggtaatcttatagggatatctccaccgaatggtccaccattgatgcgtaattcaacatcaggctgtctaaaccttagatctggacgatcatcattcccaaactcatcatcgttcataaggtcctcgtcactgctctccccaccagcgttgaaagcagcaccaggtctccaaaacatgttcctcgtaaatgttcggttatttgccatcgcaaccctgaattcgtcccccattactcggctgatataaccggggataccatttgaaatccaaagacgagttaaatgttcatatctagcatgatttaatactgttagatcacctcgttcgatagcgtttcttcctgattcaccgtgtgagttcaaataaggggccgaaatgttgacggtacagtccggtctacttaaatagaggcacacttgactgatattaggaattaaaaacaacccactggaaccatgggaacacctttccatgtgcttttgcatttcaaggccatctgtacgtgcgtgaatcttgacaccacatatcaaacaaattttataatcaagtctgttgacagtatttctaattttttgatcattctcttcacgcaaagtaatgtttttattattagtcacataagtattcaaatgagttgctaaatcggttaatttgatgatactgcagtactcatgtggagcattaaccaaggagctttcaggggagagaggagaatgcgaattcatcaacaagtcataaaaatcagtctggagcaaaaatcttatcaaaagatggaaatgtttttctttgctttcggaagtaaggctaccactcagcacatctttttcattaaaatctaaatcatccccccctgtcataaattgctttaaggccttcagcaagataattgatctccttagcgtaggtagcaattcagaaattaagaaggtatagaacaaatccaaggtgtgcttttcaacttgatcaccaaatccagctcctaatatcgttgttttcaatacaattgaaaattcagaggagtcaaggcaagtctgggctcgaagctcggattcatatttcctatagaaagacccaaagtcttttgtcagacccttcaaacgctccacgagtacttcctgtaaacaatccttaaaggaaagtctagaccttaataccgtttcaacaactcggaaaaacggataacttggtaaattgctgctacgaatatcttcatagaatttgagtacattctcttcagtatgcttagttaatcgtgtgtagacagccaaggacttgagaatgttctgcagtgtcttaaatttctgttcttcacctgataagagtgttccaaaaggatctttattaagcctggacaacatctctagcatacagatgttgttagaaaactgaagagagagagttaaaaacctatcctggatccaagtaggatcattgcgatttaaccgtagaccattgttagaatctttgagagatagtattatttttccaacttcgtcgttacattcagagctgtactcagaaaaagttagcaataaagattcatccaagcctccagtcaatttctgttgcaaaagcctatcaccagattgaagtttaactgtatcgacaggtatgactgaattacaatacgtttgacataatgggcagatgaagagatctgtactataccgcttcttatcaatataatgtttgaaacagcgatagtgcacggcatgattacaagatacaagaaccttctgtgtagactcatgcattagttgactagctccgttttcttttttcttgtaaaacaaatctgtgttataagtggcgaggtgttcgttattgtcaaagccatgccatggtttgtatatttccattggcgtagggttggacgatagaaagacaggagagtagttttgataaattgggataacaaaaaaatcatctgacacatcgtcatgacaaagagagcagtgaaattcattgagttctcctgccagatcttctccgtccatatccacatcttcgtcattaccagcactgtactcctcgtgcttgtccatgaattttttctgctgacgggagaatctattcataatctgttgttgacgatttttggctaaccttcttttacgctcctgctctgtctcctcgaaatttacaccttgatttgcttttctgattttgtagtccgcgatgtactttgttccgaaacactctgttagagattctaaaactgccgttgggcgcttcatgatcatgttatctagaaggtaatcagcagttgccacgacattctcagaaaacgatccgctttcagagtcaacaatgctcaataacaaatcacatattggtttgctaatatacgcctctggcaaagaatctttaccattgaccatttcgtcgtctctaaaaatggcatgaattaaatgaagtagctcgtaagtaaacgaaaaactggaatcggagacagccaactttaatagcttgaatatcaacttcgcaaagagatttgttcttgtgaagcttcctagttctcgcgcacatgggtctaattcatctaattcaagtaattggggtttgacaattattttggcccgtttttccttgctatcagctaaatgtgacttaacaatcgtggcactatgttcaaaatcatttcccatattcagtaaccgcagggaatctattctcttgtagagttccttctttagtttgaaaacaccattatcttcgagccctttgggctcaatgtacgtagaaacttcttcgagaactgtatcaaattgggaaacactttcagtaaggtaatcgggtatatcgttcaataagtcagtgtatgatagtggttcagcgtatagtttataaataatggcattcttaatgttgtacaattgtgtttcttccagggtatcgaactttttataaaagtctctttccaccaatatctgatataggaatgcaacgaattgttgaataatcgacgatattttatcatcgtacactgtctctgtcgagggaacacttccatcaaaccagtcaagtaattcccacctatctaacatgttatagatgactctttgaaaatcgtttttttcaattagaaacgccaattgattaagttgtatgtctctgctataggagctcatttcaggattgttcttgtaatatgctgactggtgaagaactgacataccatttctaacccaaaatcctatatcgatttgcgaacataagacgacagatctcaaagcaaaatccgaaataactagatagtctttggattgagataaaacttgaattgacacctgtaagggaacatgctgcacaaggaaagaaaacaaagtatgaacgggattcataaatgaaactcgttctttgctgatttggaattttatgatttcaaagtctttgtataatttgtatgacaagtttctatgtcccaaaaatgaatccaataagttgatggccccaataagcaatcgctggtcaatgtgatcctttgattgctgcaaaactttatcaaaagtctgaatgatgctatagactgatgtcgtatactccaaatatggaataaaatgctggtcttcccttaaaacatgctctccttcctttcttttaatcttccatgcgccgttgaagagtttacatagtgttacaatcatgataaactctcccggtttcaacaatagattagggtcagtgattttactgagtaaagtttctacagcatacaatccttgtttgaatgatatactgtagcttttagaagggttacttctctgaacccgttgccaaaccaacgtgccctcatccatggtagaaaagtcaacaaaaacgtcaatcactgaccatatgacgtagttgaaatgtccactgtgaaaaatactgtaagccgtagttgggcaggtgaataactgaacgacactctcccttaatgatgtaagttgaggttcacgatccatgaaggtcacacttcgtgtcatgtgtgggaaaatttcgactagctgatcagtaaacattggtttgtgcacagcacttgatgctagtgttggtataattagatcctgaactatttttctaagcttcttccagtacctgttttcgaggaacaacacgtattgcaacctagaattagtatattcatgatgatcttctgctattactttattcaagatgggggaaatagcagatatgtctccaggatctagggatttatgtcttccaagagggatcttgacaccttcacccaaaaccgaatgatccgcatacaaatatggatcatcactcaggtaactatctgaaaagtaatctctaacaactgaggtcatatcgatagactgataaaaaggttcgtacttggaacatagaactttgcctatagcatttctgaaaaggctttggaaagtagagtttgggatattcaaacaatcattaatccacattatgctatacttacaggcttcttgatgtagatattcataccattgagttattgtgcagctcaacccgttactttgaacggaaaagaatcctcccattaaagatgcgatatcagcgctgcatctcaacaatgatctcccctcagaatcgatcttcgcagtcaataaatcaatatgtttgttatcaggcccaccttgtctaatggcagcagaagcctgcgaatagttatgaaattcatcgttgtataccaaaatagcataatctttaagtgtactcaagggatctaacgatgtagatggcgtttgttgctgggactcctcttcgtccatgtattgatttctatatgccaatcgcctcagcatgtcagcttgttcattatatttcccgttctggatgaagtatctaagtttcgcaatgagtggtttttgaattgttgttaatggctcaatgttttggttgaagacatcgatgaaatgatcaaataattctattaggacgctttctagcatcttagaaatcttgccatcatggtcgtcaaactcgtcttccaaacgaccattatcttcagcacctttacagttcaattcatggttccatgcctccttgtcaccacaatcacatataccgttattgaattctgtgcagatcgacgtatatacgtgatgaccaacgtgatcctttggattgaaacagtttacacatagcacacaagtatcatcaaatgaacactccttacaacggtagatcggttcgcctactctaaacttcgcaccacatattctgccagcgtggttgaatttcgaatgcccgccattctcatcgatcttataccagggtttcgaactcagcttgatttccattgcttggtcgacattcttggggaattcacgctcatttgtagcagtaaacatatgcggaagaagcctaccactgtctgaaatcatatagtaataatacccatatatgaaactcttgagctctttatccataactgctctctctgcagatccctttatatctttgaattcaggccgagaatgaatgcagcctaaggttcgtccaacatgttgccgcaaaaacgactctgggtcagtatcgttaatcatattaccttagggattgttctgatattgctatgttgatgatcagttgtttatacgacaaatcaacctgtattgaacctttgtcaactgtgcattggcaaggaaagtcaaaactcttttctgatatcgtattccttttttttttattgaatctttcagaagataaaaatgaatcctctcaatgtatgtggaatttgaccgaagcaaagtgtaagaagtaccctagaaataatcatttcggttccataaacacaattgaatcatttaataagcaggttatgtttggtagcaagtggtacactgaccatcaataccttcttcttcaaataggttgtcaaaataatctaaataaagcatttctttcatgtcttcgatttgtaatccaacgttgttctcagcacacaatttagcgaagttatataaataaaaaaaactacgattaagttaggattccagctgcagttcaacgtctcgatccaaagaagctcgcctgtttcaaagtcgtcagccctataaatccctgacttttggttcaaaagtaagtcacgtgactgatattcggtcatgtgaccacggtcaaacatcaaaatatttacaataatagtccctctatacactccatagacactacccaactgatgctaactccattgtgattttacatcaggtatcctaagatattcttttttgtgctcttcgtactaatgtttaaaggtggcaaatgcctcgaatacttgctgaaacgaaaaactgaaagtaagacaagcttaaaaatgtaaatagtaaatagataaatggatgcacgttatatcaaggggcgcgcttcttgtttttgctctgttaatagtgttcattttaggtttgaatgactagcaagccaagaccagaaagaagcaggtattctttttagcgagtccatttaagatgggcgaatcagtgcgatgtctgcgtgattttttggttcactttgctcatttctgcaggtacagatacaatgatatgtgttcgttttacctttggaaggttctactcacctgtatgaaccattgtaatgaggaaataaactgggaagatcttactcatgtttttgggttaaatcagtgggaaatgggcgattttgggaagatcaaattgagatctaactggcgtgagtcactcataccgaaaaggaaacataacgatcatcgaggttcgcagtgttcgaaacagtgccatggcactgagaccgtttactactgctttgattgtacaaaaaatccgttgtatgaaatttgtgaagattgttttgatgagagtcagcacataggccaccgatatacatcacgcgtagtgacgcggccagaggggaaagtatgccattgcggcgacatatctagctataatgatcccaagaaggcttttcaatgtaggatacagagtaacaatgcagatattgatgttacgaacctacaactgtacaacgatatgtggatttcaacgttctcgcaggtactcgattttattattgactgttgttttgcttggatggatggcgatgagaagataaaacatgaagctgtggagtccataccgatcaaagactctgtaggaaatgtagaatcattttcacaaaagtatgttctcgtcttataccagcatgaatgtaacatacatgtgcaagatgttgcaaggaaaatttcaagggcattgaagaaggatatctcgtttggtacgttcgtactctcacagtttgatcaagatgagcatttcaccgttattgccgaatcaaccaataaggcttttatgctacgattgaagcaagaacttgaattacaagatataccgacccatttgatgaatgagtccaacgtttttaaaaggtacatgataagtgaactagtacgatggttacatcattttgccgttcataacccttcagttttatctggaaaattgtctcttagacttgcatacatggatcaatatgtatccaacctattggccgtgaagccattcaaaatcaacattcttgggaatttcatcgtaccacatcaaaagcataactcatttccctggatcaaaccctggaacttccaaagcaacagtgacgaaacacatgatccaaacatcaccaatgtcatgctgatatatgaccagaaaattagagaaacggatacccccaatacagcatgcagatatcttcctttatcaggttctagatttcagtattttatcaccgaatgtctgactaccttttcacagttcacgagaatgaggttgttggaagtgtttggaagtatctttagtgttagagacgattcaaaaaaatgcttagcggctcaatatttggatgtctattgtaacatcctatatcgaacaatagtctctgatgcaagcggctataaactaacactcatgagcactctttctcaatatatcttcccttcaccatcaactgcaaatatgattatcaatgctggcttcatagaaagatgtcttactttcagttattcaataatgtcttcggactcggaaatagtccctaattcaccaccgattccattgagctcagaattcaaactaccagatacggttatcaaaaataaaaaagcagttatatgcttcaaagacatttaccaggcgatgtgcactaacaccaaacctgcatcagtttttgccaatgaatccttaacgaacgcaatgcgcgaatgtttcttttctttcaacaaaatattaccactaaagcgagaaacctcagaacatgtccagtacgaaaactttgatttttcctcattttacttcttcttctcatccatcttaattatggttgacgggtttctaagaaacatatcacttgtattggaccccattaaaagaaaacaattggtgtcaacattgctcactacttcaatcgataaacacctctcctcattggacaaatttcgtccatcaatacccggaaatacttctaacaccttcaaaacaactgtgtgcaacgtacagactcgaatttttaacttcaaagttggatcagaaacccagaattttttcaatccgatatcgtattacattaaattcatacttcagtggagtcaatgtggcagatacgaaccccttccagagacgctcaaagattacttcaatttcaaggaattttttaaatctccaactgaatgtctttggatagcagaacaggccctctgcactttagttatgatatcacagattgatgttgggttttgggtacgcaatggctctccaattcagcatcaattgaaaatgtatacaaaatacagcatgcgtgaattcacttactttagtgattttttcctcgttcagttttcaatgtgttatgcggatccacatgatttcatggttaattttctaacgcgatggggactcaaatactgggcagaaggaattccaataggtgactacccagaagagagtttgacaatcgccatgacagaacaatgtttccttactttaatacgtttaatgacagaaactagagctctatgtgcttcgacttcagttgaaggtttcgaaagtactatgaaatcagaaattatccactctctctgttttcgaaagtgcagttatagttcattagttgaggcaatccctgaacacgttactaagcatcctgcatttgacttgtatttaaaccagtacagtgattaccatgagccgaccggtaatttcgataccggtacttacagtttgaaaaaacagtacaggaaacagattgacccgttcttcgtcgggttctcctccaataagcgctacgaagccaccttattagtccgtgaaaggatgaaagaaacttacggggtttcttttaatgacacatttgtacaagcttcatcaattcaggaccaattaaggaatacacaatatcaaaacctttaccaaatcacttctacagacatttttggcgtgttcgtgaagaacacattggttcatattatgaaaatgaagctcgaatctttactaggcaaagttcttcacttgattcatctttgtgttgtcaataacctggcagactttgaacgaatattttggcatgagtatcatcttgacgagtctgagaatgggttttatcatagtatcggatctttactctacaattttctatcttcggatgactttaacgtagagaatggtaagatcagagagatattccgatttttgaaagatcgggcaccacacattaatgtggacgattacctctcagaacagactccaaattatgaccccagaattttgttcactgatataagtgaatcggaaaacgaggagtacattaagaagaagatgttagcaaagtcgagaagagaaaaacttatgcagaagctagccaaacaacaaaaggaattcatggataacaacaatgtttctgcagaggatattagctcacaaggaaccaatctcgataactctgctatcggtatatgttggacatatccggaagatgattgtgtattttgcaagatgcccaaagattatgatgttttatcatactttgtatttgtcgaacgcaatgttgtttctatcaatttagcttcggatgacaaaacaaaggatgtagaatttcaaccggtgcttacaacttgtggccactgtgctcatttcggttgcttactatcacatatgaaatctttgagaaaaagtctagggcaaattaccaaaaatataagagatacatttggtttatcctcgttaaattgctctttgtgcaattctttggtaaatgcattcatacctcttttaaaaggaacgcagtactgcgctgattataattctaaaagtcttgtcacccgccatagtttggctttgattacggagctcagtggcttgaagttctcattacagaatggcttcacggctggttatactttgtttgcgaacacgatttctaaccttgagttggtattacgggatgaaagcaataagtttgtcataaacaagttaactagcagacaaatcaccagcttaaggcttttggacgatttgattagttttggcttagaaaagaaaatgatttccgccagcggtccccactccgatgacatatttatgtcactttgttcctcgatgcacatgctttccgacgacgaacatatactgcatcttttgaaaacgaaattaatagaggaattaagtctgaggatcaatgaagttgctgctttatcttaccaaaatgacattccacgtcaaaaaaaatctttctcaattccttacagagatgttatatctcaaattattatcagtaggattcatactactagtgtcattaatcagaccgaaattttgaaagcagaaggtatctttcgtggaaatgaaatgatatttatcgattttattatggtacagtttctcatctttctaagaaaggtgtgcattgccctccattctaagtacatcagtgcagacaaagctgtcatttctggaaaaggttacaatgaacttgaaaccatgatagacttttgcaacctacctcccttcatagaactactccaggaactgttttgcaagaatagtagtgatcccgaaggttcagggaaatgtagcattgtcacacgaaagccaaagattcccgtttcttctccgtttattgatttaccaagagtgatatcatatatgtcaaagcagacagattccgaaataaacctcagattcagtgccttcaaggaagacattgccatttgtatgttttgcggattatcttgcattttacagaaagtatctttgttacatttttcccgaattggacaatgcacaaatcattattacaacgagtgtaaatgtaaagcgccatttggatgtttcttcattcttaaaagtaacatcatttatttaagttatggtagtaggggatcattctatcaaacgccatacgtcaataaacacggtgaaactgacgaagattataaattgggcactcctgtcttctttaataaagcaagataccagcatttcattcaggatatcatgctctctggaaaaatacctcatctaatcaatcgagctaatgacaaaactgttgatgttggtggttgggaatcgatgtgacgcaaaaacggacgtcggcataaggcagaaccatgctcttttgctaagctgtgccattattcactcgcttgaaggaaatacaaacaatagcatctcatgataacatagcagtacatacatcacaacatatcatcgaaaatacatcataggcctttcttttttttttggcatttcaaccttcgcgacgtctttgcccagaattcttaccaaggcacattaaagcgcttgtctttaatgatgaacaaatcactgattgtcgaatcttggtacttgatcctttacagcattcaaaatatttagaggactattttataaaattattatattatttagtgcgtgaaaggttatttggcatcttccaaattagtttcttttagcgcttcagccgcttgctcaacagctggcttagcacctgggtaacgatcacctttattctttgatttcttagctttcttggtcttttcaactactggtggtggataacccttagcttcagcctcttggaactcaggattgttttgaaattcttctctaagtggagccaatagctcgttgatagcatcagagacaccggactttaaatctggaggagctaatttttgctccttgaagtcctgcttaatctgatctagagaagtatatgaaattggtccaccgaatttttcaggacggttgatatcgaacttaaagtgatcactaccgtatttcaactcttgtattggtgcaacaacagattcgatgaaagccaataacccattatcttcaacgacacctggggcacagaatgcactgttaatcttcttcttaacttgttttggttcttctaataaatcaatcttagaatttggatcagaagcagacatcttaccaccttggcctaagcctggaaccattggattcatcaaatgtgctcttttcttatagcccaatttttccaaattctcttctgctagcacgaagatctttctttgatcaacaccaccgaattggacatcgacaccaagatgttcttcatctaaggcttgcatcaaagggtaaatcaaaccactcaacaatgggttagcgacttgcttcacaacatcggcaccagctctcttggcatcgttttgagaaacaatgttagacaacttgaagatgtccatgatgtattcgttggaggtttgataagaagaaccaataacgaacttcaatttttcaattggaacgttgatgcttctcaaaatcgccttgatgactagttcgtaatactttgctctgtaagcaacaacttccaaagaagccttcatattatccaagaaagcgtgcaaatcggccaatagaacagtaacttcacagccagctttcaaaaaatctgccaacttggtcattggaacaaaataaccacagtgaggtctaccggttggtgcagtaccccagtacaatttcaaaggtctcttttcaacttccaaaacattcttgataatctgggcattgagaacttcctgcaagttcttggtgatcaaagcatattgttcatttggatctgtgacggacgacatctcttcacaattcgtatcaacttggattataattcctatctaaaaagccttgtaacacaaaaaatggcaaaacagaaaagacaaaaaacacttcaggatagttctcaaaaccctatggttgagcttgataaatattaatgctggtgattcaaagtcaactgaatacaaacaatccttctggtcaatgtcaagtgagtcacatggaatctgtcttcttttgtcgaaaagatacagagagatgagaacaaaacgctgaaaatgatttttagatctgatacacccgtacatcacataccgtacaaagcacgtgatcaggaaatataattccaggctcttaatttagtcaaaagctgactccaacaacgtcttaatatagcattcttggtttagtagagtaatatacatccacttgaaggtctcaggttacttacaacctgccagaagcccaccaacgggtagttgattcttcttttttcttcctggttgctagtatttttcaatgaagaactggagtttgaggaaactaaaagttttgaatatcaaactatgaatttacaaagtatgaagaagcagttagcaattagattgcagttctcttgattgaacaggatcaagcagctggtattgtaactctgttgaatagttaggattttggtggaagagagcagtggaattcctgctacgaaaataatcgagcctactgaaactatgtctaatgcaaccaagtccaatgatgcgtcgcccttcatcaagagggatcagatgagaagggagttcttgagagcaagacaaaggagtaacaatccgaagcctatagtaaagaaagaggatcccgaacaagctgcagaagaggctaggaagttattgcagcctgaggcactatctagaagggttaagagggagccaggtaagtcagggtatagtgagtttccattgcgagcaattgacatgagagataaagaaaacgttaagacgaatttggtcaaatttcagtctaagaaaccaatagaccctgaggatttccatttacccatcagattacatcgtaaggatactagaaacttgcaattccagttgaccagagcggaaattgtgcaaagacagaaggaaattgcggaattcaagcagagacaactcgaagaagcaggaggtgcaggaccgggtactggcggtagcaactcaacgccgacagcatctaaaggtaacagtactggtggaagtttctctcaatctaacgggaaaccatataatagcaaacaaggaacgccagttccaggtacgttgaatggtccaaaagtgggagtaactaattataataatacagatggtcctaacgtgaataataacggttcatcaagttcagagctgaaaactggcacagattccggctctcctccaaatgggaaagaaggaactcccagcaataccgtcactatccttgaagaggctggagtggcagaagacccaactaaggtcggtatggttaaatatgatggtaaggctgaacctgagatacacgaagaaggtactatagaccctatggctgatgttgcaccacatggaggtggtcgttttagaaggggtaattctaaaagaaagacaagacagttgaagagattagatgaagaagcgaaaaggttaagattcgaagaattttatccatgggtcatggaagattttgatggttttaacacctgggtaggttcatacgaagcaggtaactcagactcatatgtccttttaagtgttgaagacgacgggagctttactatgattcctgcggataaagtctaccgtttcactgcaagaaataaatataacacattgaccattgaagaagccgagaaaaggatggagaagaacaaagaaggtgctcctcgttggtttatgaagcatttggacgagtccagtaaaacaaccacaagatatgatagaaccttaagaagacttagagctgtcgatgggaacacaagacaggccgaagatgatgaggaccgtggagataactcagaggtcgaattggattacgatgaagaatttgcggatgatgaagaagcaccaatcatagacggtaatgaagaagagaataaggaatcggaacaaaggatcaagaaagaaatgttacaagctaatgctttgggattacgtgacgatgatggggaagagtcagatgacgaactatttggagagaaaaaaattgacgaagaaggtgaaaaagtcaagaaagccctccttaaaacagatctgggtgctttatatgaatctgatgcagaagagaacccatatctatcacactctgaggaagatgaagagcaagctgattcggataagaaagattccgagaaggataatgaaaagcaaagtcggagatcctcaccaaagaagaaagcttctgacacaccatcaggtccaccaaaattagtagtaaaaagcattaatcaaaatatcgttgtactaactggtgagaaatcagtattatcgaacttccctgcaggagcctggaatccaaacttgaagaaacgtccagcagagtctcagccacaagaatctatggacaataagagggcaaagtctgatcactcggcagatgatttgttaacggaagacgatataatcaatgcaattgagggcaagcagttgactttgaaacaattaatcagacaattgaaagaaaaggtcggtagacatcctgacaataaagaaagaatgaaggtttttgtcaagaaacttgttaaactgaacggtaaattcctcgaattgagtaagtagttaacataatttcctcgttttcaaacctctggagatatacatgtagtgataattgatatatatcacctgggtccaattggaaggggcaggaaatagcatattgatatagtcagtttattaacaataagtacgcttaaaataaatatatgttatttgaaaacaagatatctataggaagttatcatttataaaacttcgacgatagcatcgtcatcatcgtcggactcttcttcttcttcttcttcttctatctcggctatttcgccatcttccgcagatttggccacgatttcttctatcacttgattctccggctcacctctcatcaacatgttaacaattctatgagataattcaccgatatcgtcatttccaatatttttatgtaactctctgaccaatgggtatactgatttcgatcttaagtattctctgccggctttagtggtacaaagcaataaaatactttctaaatgcacacatatgatttcaggaataggatctctctctttgtcggcaggtaagagttgcaattcatccggtagattgaacatatcttcttcatcaatttcggagtctttagctgatgcaatcggtagaagaatataaggtaaaagattgatttcctcattagtcaaaaggttttcatgcttttcggaatcaaataacgaattcttgatggtataagccacaccttctcttctggttttagcatcatacttttcagtgaataccaatagtttagaaattgggatgacgccgtcatactcctgctgttcaatgaaatactctctaccaatcttaaatctcgaaatgtcggcaaagaaataagctaagtagtcataagtggcatatctgttcaactttctatcgtaacccttcacaaaacaatccattaagcaatccattactttgttgcttttaaagacttctatgtttaatggaataccatcgtcttccttcttaacaaacgaaaacaattcggtaatattgtcttccttggcgagattagacaataaaatacacatgatatccgcacttgcgttagctaaatcacagattttccacgataagtactgtaggaattcagtatccttgacgatcaactttctcatagtaacatcatcacataaattcgctaaaatcgtagtggattgttgaacgataacttttgacttatctttagctagaacttttagatcctctatagctttgtaattattacatttgaaaatgacagcacttgctccagttgagaagccaaccagattatcaagagcaatctgtctgacggcaggctggtctgaatgcaaaaatgacactaattcttctaattccgtggacatcttccctctttatcgtatcaagtaaacgcagatatttcgaacaaagatgttttattgaacaatgaaagttatagttgattagctggtgaacaatacctagttacaccaactgccaacgtagatatggttgatgcgatgagctgcgatgagtttgtcaaacgtttctcaagtttcgtgaaagaaaaggttcgactctttaaggcgggtaacaattacatcagcatcaaaccgacaataacagatctccatcttcaattaaatgaatagaaccaccgttagaaacagagcttttcaatctgcgattcgattgatccttaagtgctgcatttatcataataaatcacttttattctagtcttggcttattgcaaccaattgcaatcataactacgagataacagcattggaaaatgagttatcgcttcaccgacctaaagtcttccaaaagtggaagtttcaacaacaacaaactactacggatacaggattctacaatgctgacagcaggacttagtgctgggatattgcaacttcaatcttttgcaggttttggaatgttttttgctgtttatatcctggtgaacctcatatttatagcgtggttttgcaaattcaagcctagtctatattttactaatccagtgcataaaatatgggttaaaaatctattccgcgagctagctgggtttgtcatgacttggacgttagcgttcactttggtcaggtaacgcatatgacacattttgcattaacgggttgatttcatctgaacgatatcaccattaggattctagaagtactataatattatggtcattaaaacttatagcagagataaatatttgcatgtattataaacaggatgatgataaacaatatgtacatttaaaggatattaatttattaggtagtaatctgttctcaacaacagattttagaagatattaagatcttcgtgagagatatcacggggatacaaaacgtaagaaatggcaatcttcatcaatagaatgatttagaaagtgaaccagttattagggaaagaaagcgtggttatcaaatgcaaatattcgaggcagaacaattttttttgtcttgctttcccaagttgaggctgacatacatctatatctgaattttttccaccaaagttgctaacttttcaacactagccaaatgcctgttacccaaagtgttatttttattggatttatccaaataggatctgatggaaataacaatcaacctctcatcttcaccagttgcgacacccacgagcttttgaacaacgtagttcgcgtattgatcccgcatcattagaatcaatggtgcattatcttccaaatcagcggcgtgctcttcgtctcttggtagaatttgatccaaaatctgtcttatctggtttttggatccgtaaactactgacttttcaacaacattggaggcaaatttgtgttttgaatattcaacaacattcttacgaatgatatcgatgatattttgtttactcattcctatgtgactgctcgtatcttcagttccatgctgtaaaatatgctgaattacgtagttaccgtattgatcctggatcaagaatgggatgaattcatccaagtcattcaaaatatcatcttggtcctttagagttccaaattccaatagtctttgaactacacggcaaccgtaagaatgcgttgataaatgatagatttgtcctcttaaactttggagaataaatggtaatttttcaatcggaatacactcgatggctttttgtataacatggttaccattctggtctttgatcatagctaaaacacaatgggaaagttcagatacgagatcaaccttttgatcttcatttaggaattcaaatgccttttgtataacacggcaagcatacatttctaacgacaagttctccattttgcctctgaattgatccactaatacctccctttgtgtttttgtaccatgttcaaagaatttttgaatgacatagttaccgaacacgtcatgagataatggtatacattggtctctaatctcattgaagattacttccttatcagcatcagaagctgttgccaattcctgttggataaatctggaaccatgttgatctttacagaactctaaagcggagccgtaaatatcgctaagtttgtaaactttattggaagaattgttcctgaattcctccaataatggggatctaacgataggctgtttgttattctggcgagcatttttaccttggcgaccctgtttgtttgcacctgaacctgaagaactttgcaaagtgtttgggggcactgccatacctgccctacttggtggcggagagaattgtgaatattgagccttacctgcgtgcaggtatggatttgatttatttttgccagagtatttagaatcgttatttctcttgttagaaccggaaccattgtctgcggatggaggggagcttggagcgtcttgtaagttacctggacgtggttgcatagatggaggcatgaacatgtaaggatttggtggcaagaaagtagggctcaaaggaggtttaacagtttcactatccttattattttctgtgtcatcttctttgattggagcatacatgaaaggatatggactggggaatggataaggagccattggatgtggcatcatcgttggatgattacctgtttcacctgatgtctctgataattcggactcgtgttggttctttctagaagcggaagcctctttggtaacaccatcagtagtctcgacatcttgactgttatcgttggatccattcatacctgggaatggttgtggtggtggagacagcacaggaggtaaaaacatgggcattccaaattgattaaacccaggataaccatagttgaaaggagctgcctgctgattagcaaacgaggcagggtcatttggatcaatgtcctggtcacttggaaaaggagcagttttgccgtccttagaacgacggtaagagaattgaggctggaattgaggctgacgttgatgcagtggagattgctgctgctgctgttgttgttggtagtggtattgttgttgcatgtgttcggcattctgaggtctgaatacgggtgcagcagccacgttccaaatggtagtagaattaggctcattattttgcatcgataaactttcactaacggagtccaacacttcagaggtatccgacattcttcttgcaccatgcagcgtcgtattagatccgactctcgataaatgctccaagcctgtggttgcagatgctcttctcgagccagtaccagcgtgattcgaactcgaaggaggcccaccaacgttaacactacccacacccacattcaattccacttcacgagtaccctcagctaaggcacgaccaaacctttcgaaaaatccagatgtaactgaactattattgacaccgatcgaattagaattagtcacgcttccgttgtaactgttcaagttcggattattattattttggaattgagctgtcagaccaccagcgatactggcagagtaatggttcatggcattcaatctattctgagcgtgggacgaagagttctcaggcagagacatcccgcctacagacagagtagttctcctcaacatgggagaattctgtgtattgaaaaagatctctgagtccacatcgcttcccgtattactattgaaagaggcccttctgaacccaccaatctgttgctgctgctgcgcctgtacttgctgctgttgaacctgctgctgtgcttgttgctgtacattcggatttgacagtgccgaaagcgacgagactattgatgctaattcagaatcaatctgggtattattatccttatcgtcagaaacagcggtattccagccgttcagttgctctgaaagtgacatcttaacaagatttgagtactctaaaccactgacaactaacttgggaaccgcaaataccaatataaagtaaaaatgcgaagatcaacgacaatgtagtattaacaaaaattgaggaacgacaaagggaactctggtcccaagaaacaaaacaaagaaaaatgggggaaaaaaaaagtgatacactaaatgcagttcacccaagcctaaggtacctggagagtaaagctgtaacaaaggacaaactcagaaaagactatatatgccgcgaactggagtgtcctttactccagagtactttaatatccaatggatagtttcaatatccataaaaacgtaaattaaacaaaatatgaaaagttcaaaatgttgataatcgataattccaggttttctcatgaaaagacaatgaaagccagaagacgaatccctcgacggttatgttccgttcttgcagggcatagttcgacaggggaaccagttcggaaaaaccagaaaaattaaatcatgtccgggtagtagtttttaaaaggtcgcccgttcgagtcccctatgttctcgaattttagtaaaaaaaaagtataaatttataggagtttcatgataggcattatttcgagaacccggtctagattgagaccaaaagaaatgaaactaaaaggaaggtaaagggaaacgaaaagaaagaggaataacatgtcagttcttctccatgtattctaggtcattagttaagcctttttttatttcctttttatggctgagtagactgaactggactggaccggctacaaaatgggaacgcggaggagggtaacatggcagtgcgtgtcccacgcacttgcaaactcacccaaactgatccctgagtccatccatactatctgtccctccacatttttgtttcggaaaagatcggccagagatcttgtttcttgtcctaggagaataagaagaaaaaagaccaatattctggcctggctagaatatgatgggtgtacgacacgttcttattgttacgagtagcgtattatgaattaagtaataagagaagacggtgaatggaacaaactgaatacatgccgtgttcttgttcgaagaatatccgagtgaaccgtgattgtataatagagacggccggaaacatgtgtagtatctgtgaatgagatttttgaaattttcggttaattcgaaatttgaaatttgatgtgatatcaattccatatgctttatataacaagatgaatttatatattccgcagtatgagctggtttgaaagggaaactactactgcaagacatatcacaagtttcaatactattccataccataccaaacgtcctttttcaagactaggatattcaccgttaaactatacacatttccgtctactgaatccagatcctttttcttttttttccattttagtttgagctaaattatacttcgtctttgggtatatattacaagagacaagaacaccatcacattcctttctatttgtattagttaactccttcaccctgttattgccaggctcagtttcgctctttttttcattcaggtagctccgatacatcatgtcaaagtctgaagattttattatggaatatacctcggaaaatgtcactggagttgacaacgagttcagtctcagttccgaagatgaatacgtcgcgctaacaagacttgcacggttcatcaaatcagcaaatcagaaactagagaaattggagtccgtgcttccttcaacttctgtcgctacgacgacaagtttgcccagacaagggtttaacaagttaagacaaagaggccgtaaatttttgagatggaacaacaagcctgtcgaggctgagaaagaggtttcatatcaagatttcatcaacaatccagacgcaccagcgttttataggtttttgaaacgtaccacggaagagttaacagctgttttgcctgagaatgacactgaaactatgattgctgaagagttcgaaagaagtttgaacaggtcttcaatcacttctccgttgttaaaattctcacagatttacgatgatcatttcacttcgtttgcttctagctctacgactcttcactcctcgacaaaggattctaccagatcatcatcacaaacttcatcgaaaatgcctcggtttgacgatagcataagtcatagtgctctttcgtcttcacactctaacagttcagatgataactgtcaagacaactctcgctacgattcacataacgtctcctcgttctcaatcaacaaattaaagctggaccgtagtgaaatgtgtgaactggaaactatcgacgataaatgcgtcgacattgatacccaacaagtgatccaaacgctagatttcctcgacgaacatctcgacttgttcattgaagatcctcactcaattaagaaaacaatacagttctataactgggataacgcatgcgatctaggtcgccaaaggcatttgcatttctacgaattaccattcccatggagagaaaacaggtacatcatccacggttaccgattttatgattctcatgtaaaatctgtattatcggtcgtcaactggtatggctggcataatgaaacactaaacatttggtcccatttgttcggtgcagtttatttagcataccttttgttcatccagttaccaaccactaaagtattcatgtcccaagatgtacctttatttggtaaactcataatccaagtttttttgattgcaggtgtaaagtgtttactatcatcctctgtatggcatacgcttaatgggacttgctgtctaccactgagatgtaaattcgcatgtattgattacactggcatcacggtgttgatcacggcttccattctatcgacagagtttgtgtcagtttataaccttgctacccaatcattatccacctcaatgacggtatatatgtcactgtcgctttgcttaggtattttcggctccttcatgaactggtcccccagattcgatagacctgaatccaggccgttcaggattgccttctatgttctattagctggtctaggtatgatctcgtttctccatctcacgattagtcgtggtattgaccactcatctcaatttttcaagcctgtttggaacaggtcgcttatctggtacctaatcggagtggtattctacggttctttcattcctgaacgttggagaaccgatgtcgaattagactataccattccaacagacgcagaactatgctcgaatttggatattctgacgaaacacaaacacgtccacttcagagcggtcccatcgaaaagctccagaaccgggtttttctctttatggtgggtcgactatttcttatcatcacatactttgtggcacttcttcgtccttttgggtgtgattggacattataatgcattgctcgacatgttcgaaaccaaatggcaattatgactttaactctttcacttcaaacttctttcacaaactttacactccgttaagaaaacaaagactttttatcttcatttcaatcttattgcacacctaggaataccatcttggtccttctcatttattactttctgtacatacgaatttagaaatccattcttggaaatggatttcacgaaacatatttttaatgcccttcgatactgaaccattctttgatatatatatatatatgattgtgttattattattggaatatttcattgtttacgttacattatagtatacagtgggatcaattcgaaacttagaacctaactctttgttatctctttcccaaattttcacatttaggattaaatgtcacacttacgattcaaattcagaatgaacttcagttggcgttatcaactgattctgaacacagtgaaatatccagtaatcacagaaaacaagtaaacgcatgtatggtttaaaacatgactcgttggctaatattcaacccatcttcattccatgccttcatctttcttctctctgattatttattgaacctttttaacagatgctataaaagaaaaatatgtcattggtaatctgacctcatctcatatgttaggaagagtgagactaaagaaaggaaagaggtctaccaagggctgcacagattacatttcacagaatggcagtgatcaatcagccttcgggccagatcaaattgactaatgtttctatggttaagctaaagaaagctaagaaaagattcgaagttgcatgttatcagaataaagttcaagattataggaatggtgtagagaaagatttggacgaagtgcttcagatcaatcaagtgtttatcaacgtatccaagggccaagttgcttcgaaggaagacttacaaaaggcatttcaaactacggatgtcgatgcgatcattaaagagattttgtttaagggagaaatccaactctctgagaaggaaagacaattgcaattgaacaaaatcaacaatgaaatgctaactattatcagcgctaagtgcatcaatccaaagtctaaaaagagatatcccccaacaatgattcacaaggctttgttggaactaaaattcaatgttgtcgttaacaaggcagccaagctacaagctctagaagccatcaaattgttgattgctaaacagattattccaatcgcaagatccaagatgaagatcaaggtagctgtgaacttggagactgcaggatcatcagaactcattgaacaattaaatactctaataagatctggccaaacaagtcaaacagaaacagcctggacaagtatagggttaatagatccagtggcatacagggaacttgttaacatctgtaatcaaaaggcaacattacaagtgttagatatggctgtgatagaagagtctaattaaagatacattatagtatatgtagctcactagtttacacattattgaggcatttcccgtattcttttgcacttaagttcaattcacatatgcttctttcacagcatttaatagaaatatcaacttctcaaattcatttgattgagacttcctccataactttgtacttagagtgataacaaagtctggcacactggctcctacttctgacccaagagttggtaggatgactcgttcatataactgggctatttgtgtgcaaatgattggaattttcatgtcattagagtcacctaatttcgttatgacatcgtaatgggaaagcggatcatttacaggagcatagtcactatcgtcatcaccaccatcaagcacaaatcgggcctctgtgtcattcaaacctttagatttcacttcgtatgtagaatccatctcaccatttactcgaagttgtagcactatcttattgtcataatgattggcaaatatgcctaattcaccgggaaaatcactaaagacttccggatctaactgtttttgaaattcaatgaatctcatgttgcaccttgaatgaattcaaattatcacttgctttattactgtggtatcttttgtttacatatttggtcgtttatttagcagtatttctttccttagcatattacgaacatcaccttgatatttttgtgtaaatgcaaacattttgaacaaacgaacagatacatgatctaaagcagaagcaaacaaacctaattaattttatagcttctgaattagtggcacagtagttagcatctgagtggtttgctatggttcaaaaatggtaccatgcagtcgtttcgcgactaataacggtatgcttccttactgtcctaatgatctgtgcaatatggcacaatttctttacgtcccatctgctcaagcgcaaacagcgtatcatattagatccgcgtgataccagggccgctaatgtgatcacacctcaaacaactggccattcacatatggtgcgcagaaggaccgagtcgttcagctccctagttccactggaagtcgatgtggaagtcgatgatgtaaacaatatcgagtatgatcgtaccatatcaagaagaacggaacttaaagactctgatttcaatccattttccgatatcttgtctgctgaagatttgaagctagttccaaatctccagtattactattcccaatacaatattatcatcgatgaatatgaagtaacaacaaaggatggcttcattttagagctttggcatttgagaaacgagaacgaggggaagacaaacacgaagtaccctgttttaatgttacatggacttttacaaagtagtggttcttttgcgtctagtggcaggaagtcattagcttattacatgcacgattcgggctacgatgtgtggttaggaaataatcgttgtggattcaactctaaatgggatagagaaaagctgacccccaacggtgaatgggattgggatctagattctatgaccagatatgaccttgaagcccttattgaaagtgtcctccaaaaaaagcaaaataagtttgagaagcttaccttagtggcccattcccagggtaccacacaagcttttatgggacttgtaaatggtgaagagatctacaaaaatacagagttcagattgagtgataaattagataatttagttgcattagcacctgctgtttatcccggtccactactcgatgaaaaatatttcgttaagtttatggcgaaacacatagataatcgctgggtattcggaaacaaatcatttgtaccaatgatgatggagatgagaaatttgttggccggacacaagatattctcatttttgtcttacgtcatgttcaactacttgttcaactggaacgatattttatgggacagacccttgcgtgatagacatttcctattttctccagtgcatatatctgtgaaattgatgcaatggtggttaagtcttaaccctttaaagtcaagcttcaagactttcgccgaagacatgttccccgacatcaagacctggttcccaatacaaaatgaaacagtaagtatggatgaacatttacacagaaatcaacataaacctttgccagaaaattggccaaagattttactcttcacacccaggcaagatagacttgtagacggagaaagattgattaatcactttatcaaccacgaaccacactctgtctacaaaatctggtatattgatgagtattcacatttggatgttctatgggccagtgacgttatcgaaagaattggtaacccaatgcttgcacatttgagaattccgaaaccgacatttgccagttaattaatacagataactttgaatcacagactagaatggaattttgacactttgtttccattttgtgcaacccaacatatagatatacagttctgcaatcattacattttttgtaagatatataatatactaatgacactacttaaacggtaaaaaaagggtacacaaagataatcccaatacagctttggaaactcaagtactcagtgactgtagcaatggctaaatcatgttgttgttattttaataaggtctttaactgtcatcttatatcgtccttgtatattcggcataatttctttttaacaatttttcaagttatcgaaatgcaaatctcatctcatctcatcgcatcataagcagtgaaagggaatgggaagaggaaaccactggaactgtttccatatcatagttgctgattaactagcacaaggtctaccatatttagtgccaactggggatattgaaagaatagcgaaatgaagatcaaaactatcagcagaagtgccgatgattatgtgccggtgaagagcacacaagagtctcagatgcctcgtaatttaaatccggctctgcatccattcgaaagagctagagaatatacaaaggctttgaatgccaccaagcttgaaagaatgtttgctaagccatttgtcggtcagcttggatacggtcacagggatggtgtgtacaccattgcaaagaattacaatgtattaaacaaacttgctacggctagtggtgacggtgttatcaagtactggaacatgtcaactagagaagagttaagttcattcaaggcacattacggtatggttactggtctgtgtgttactccttcatatttatctccacaaagagaaaacttcatgctttcttgtggtgacgataagacggtgaagctatggtcagtgaattctgacgacttttccaacgttaaagatgatacaagattgaatacagatgaaggtatcatcaaaacattccatggtgaacatgctttccaatctttggatcatcatagacaaaaatcgaattttgttactggtggtgcccaaatcgaactttgggatacaaacagatcaaagccaatatcaaatctttcatggggtgcggacaatatcaatcatgttagatttaatcaaaatgaggtcgacattttagcaagtacgggtagtgataactctgtggttctttatgacctaagaacaaactctccaacacaaaaaattgttcaaaccatgaggacaaactctatctgttggaacccagtggaagccttcaacttcgtaattgccaatgaagatcataatgcttattactatgatatgagaaatatgtccaaagctttgcatgtgtttaaagatcatgttagtgctgttatggatgttgatttttcccctactggtgacgaagttgtaacaggctcctatgataagacaatcagaatttaccaagttaaacatggtcattcgagagaaatatatcatacaaagagaatgcagcatattttccaagtgaaatataccatggacagtaagtatatagtaagtggttcagatgatggtaacgttagactatggagagccaaggcatgggagagatctaatgcgaagagtacacgtgaaaagaataagttggaatacgatgaaaaacttaaagaaagattcaagcacatgccagaggtcagaagaattagcaggcacagacacgtccctaaggttgttaagaaagctcaagagattaagaagattgaaattgattctttgaagagaagggaaagaaacgaaagaaagacaaggaaagacatgccatttttacctgaaaggaagaaacaaatcgtcggtactgtctttcaatacgaggacgacaagaaatctaattcgaatagatccaacgattccgaagatgaataaaatatatgaatttctatcagttttgaattagatatttataaatttgtaacgttaataagctcgaaacatgtctcttttttcttgaagttataaatcaaggtagttgatcaagttttcctttcaatgaaaaatcgtttttagcaaggaactatcttttaccgagattagcagatatcttctttataatttgaatcatgggttgcatgtaacgaattgaatcctttcatattcttttacagtattagattagaagtatagttccataataaaagtgagagaaaaagaaaaaaaaaaaaaagaggaagtgaacacaagaagaaccagccttgcttgcccaatataatatgatgagtattatagtactaatgagtctatcaatttgaaactatggcaatgaatattagagagagggagagagagagagaagaagatgtggtcatgcaaaaaaaaaaaagacccaatatatgcaatcgtttgcataaacaaagcataaaatgaatcagtaccaactaattatattgtcacatctaagatttccccaacatcaggtaccctctcttcagccaagtcttccagaagtggaatgatgtcaagcaattcattatcgtgggcatctgaaaaccaggatgagattggaatggcgtgctgaggatggaatatgtaagaagcaggggaattatccaagataatcatatctgatagtggtctaccaatttgggaaagattcttgatataattgccctcgtagttgtaacaggagtctctgaacaacctatgatgaatagttttgtccttgtccaatatatccaacaatgggtcaccgtagcgggacacacttgcagtaaacaccacgacttcgtatagttcagtaatgcgtctcaaaaattcgtcgacaccaggcctttttatcacgtacacattgtgaacttggttatcgatttccacaggaataacaaaatcagcagtacgtagatatttgaaagaggaatggaccaacgtttcatccaggtctaagactagacatttcttacccttaaacatatcggccttcggcaacaacaaggtattgcaccccggtgcatgggcctgatctggctgcaattgagacaaatccaaaggttccccatcttcgggctccccatttgtcatttctacatcgctaacgccttgactatgaatgccctcggagtcatccgcactactggtatgttcagtctcgtgaatcgtggtcgtgacctctgcagttggctgagttgcagacactgcggtgtctgcagttgtgccagtacttgtatcagattcagcgttatataccaacagtgtttgcttttcatccccttttacatccacatcgtcatcttcctctccaaccatgtcaacgtcaacgacatcactatcagtatcgttattactaacagcagccgtattcttcgacagcggactcttctcaacaggcgcacttgcaacagccgctacagttgagctatgcttgttcgccgcatttttctttttcagatgcatcttggctgtagaattggataacgtagtatgaatttctgattgtcttgaatgagtcgcagcaacccctggacgtccactcttctttgcacttagcgtattcttgctcttacttttctccgagcttgacccactagaacctttattactattgttacttgacgatgaattcctacccttctgtttcctagagctatccgaatcgcttgaaccacacaataaagatgcaatgaatcccatcacttttattcctaacaaaatcaacagcgacctataaataaatcgagacactgagcgagtgagagaaaccaaaaatcacacactgagcccaaaaaaaatggataaccgatattaatcagattggtttttcaaacggattgatactgttattaatatatgttctttctttctatctaagcaaagaaagatagcaaacaaaaaaaacctaaatacacaaaccaatcaggctccctgaaaccactggccccttgatatagtacccgtacactgacaaatcccggtacttttcaagactttactgcccttctgtaaatggcctccaaaaaaaattaagttgcagttaaaataagagagttagtcaatgaccaatgttctattctcaaaattgtttaatctgcaaaagttgactgtttctggtttttccatgctgaacagaacatcaaaacttaaagaacgaaccaaacgaagcaaaaagaattttttcttttccctggcacaagatggtgcgggtaacgagatgtttttcacttgaaagagatagaggccggcttgaagattcacttcttagtttaactactaaaaacacagctagttcttcaatgttaataaataagaatcgttcagtttttacctggatacggtaagtttcatatcctgatattagtggtgtttttactgtggtaattgatcgagagtttaccccgtaaatacagggatcaagatatataaaggaaaaaggtgagagtagcaatggataatggaatttctgcgcctggcacaccggccaagacttttcagactcccaataggcctttgagccagcagcaatttcaatccttaagggaaaaagctatcaaacagtcgcctgcattgtataaacacaaggtattgagtgatcctaccagcaagactgatgtttccaagtcagattcttcctctgtgtttgctgcatctgcgttctctggcagatttgacgcgaaaccttcagcatcaactaatacacataccgcatcccctgtttttcgaggaaaaagtaaccaggcatattctacacagcaagataccgcaccagtgacaaattctgatctgctaccggacgaaccggtgggacagaaacaacaaacggatttgaacttttccgaagattccgcatatgataaattgactgatttcgaaaacccggcgttggctgctttcacatctcgtatggttaataaagagttggagatgagaaggttgttgactaatgtagtgttggcaatgatttggaatctcatatacaaattcgtgtcattattcttccaattcactaaaaggggatcccaacttcgagacgaactgtatcttttcgtattgaaaaacgttgtttataagattaacccacatgccaacatcaattcattttggttccaaatgctttcttggcaatttgcaaccagtatattccatactattgtcatttttaacattgcatcgtgtctttggaacttgctgataaaagcacaaaatacggacatatcagatttgcatctaaccgagaatcaaaaacgcttgttaggggttgtggaaagcacccccgactatggtagatcctttgatccttcaattaatataggtaactctaaagtgaaatccttaaatgaagcagaatcaaaatccagccacaagcctttcatattcaaatctttacagactccaatgaaaatgcgtgagttgaatacccttcagcaagcagaagtgaaaaaaaatcatgtatctttctctttacaaccgaagaaagtaaacgcctttggtgtcgatcacataacaaatgtctccaatactcctacaactttattcacatcgacacgctcacagccagacactcgtcccggatatattccaagcaaccggtatacttatatgatggactcaccaagtgcgatgaagaagcgctgaaaagcatgcgtacttcggagaacgattctttttcttcttcttttggtttcgaacctctgatagcagttatgataagaatgttattacttacatggctacctaccgcgtatagtttataaagtttatagaagagaaatttacagcgttaccaatggtttgggaatagaaactttagcttggccaaggcatcttgagacatggcttcaggttttgttgaaatggagtacttcatggcatcctttagaccatcaccgttgttcataaattcaggaagttgctttgccatttctaaaatgacccgggatgccaaatggttagcatttttggcattgttctgtaaattacggataacagtttgtacagacactggttcttcttcgtctctccatgcatcataatcggtagacatacaaaccatctggtatagaatttcacattcacgagccaatttcgcttcagggatcacactcatgttgatgacatctccacccatcagacggtacatcttagattcagccctggtcgaaaattggggaccttccatacagacaacggttagttctctattgtagtgcaacaggcaaggttcttcagactctgggttttccagaatatctttgaattgataaatatactcagcaaatgacttggagaatggttcaccgaacacaacatgcccaactaggccttcatcgttgaagtaagaggactctctgatccccttggttctatcgatgatttgttgaggcaacacgaagtctcttggtttaatttcctgttgtaaagaaccgacagcactgaaggacaaaatagcactggttttcaagttcttcaaggcagcaatgttagctctgaatggaacccttgttggtgggtactcatgattcacaccgtgtctagcaataaaggccacatggaaatgctcagtttcatctgattttacacgagacaccgtgattggagaagaagtcttaccccaaggtgtttccatacacggaagaatggcaattggttccaaacaatccaaagtgtacaaaccagtaccgccaatgattcctagatcaatagtcccatcaaaagtctgaggtaactgcgtagaattcgtcattttaaagctgtagaatttcgggataacgttaaacttcctgacgaacgttttcataaaacgaataacgttgtaaagaggaactagaagagttttggttcaccagatcagatttgaaaggactaatttacagacagttttatttaaattaatgcatgcatgcgctcattgtaaacttttctgaagatggagatgagcattcgagagacaacgcaggtgaaaaaaaatgaataatcacgtgctcttcttctttttcttttgtttcaatgatactattaaaaagacacaattattaacagaacctagcttctaagactatgcttttaattgcataaatgatttttgtatagttgtaggtatactaaagttggaatttggaatttctggttatcgcagtatttacaggaatgaggatggggtagtcgaaaaccttccaaaccttccaaacattgatatatgtataaatattcttctcttcgcaaagtttcgtcataatgggtcagctgccattgtcgcattagattcaaacttcaaagccatatcccttcatacaggtcttatacttagcgatcaactcatcgcacttaccggattcttggccattaaatagaagacattcgtctctagcttccttttctggcttgcaaacacagcatggctttggcttagtagcctctgtctctgtcttaactggagcagtgttggtctcttgtggcattgtttctatagagttttgctgttgggatgtgtctggatattgaactgaaaggtatcaggttaaatggtgacagattaaagggctggtttcaataacttacctacaattctttacaaaccatcgacatgttagttgtattactaaatcctgtgagaagcttctcagtagttacctttttgaacttttaacattcagtgtctgatttcattacccggataatgctcatgtgacttgtccgattgattatctaatccgccatatatggtaaaaatgttcgaacgaagagtccatatggagagctgctggaagttgaattacaggctcgatagagttctcctagagataaataagaagttggtacattgtatagaatatcaaaaccaccagatcagctttcaatttcaactgattgctgagtttgcaatatcagtcacgtggtaattttatatctcctatcacctctcttatactcttcatccttaacttagggcagtaaaatgaaaagcggacagtaggttcagtttgaacatgaggtctcattaaagctagcagctggatccctcacattgcagcattaccgttccacgtatgatgatgtcaaagcttccctttttgttaaggggagactttgcacgttggaaacgaaaatttctcactgaattgatggagagctgaaaaaaatgtgaaataacaaaatgtgcaaaatataatgtttgatacggacatactgatgcactagattggaaattcaggtgcatagtaaaaccctacttcactctggtattgtcataacccaagtgctcattgaaatatagtgttacaacgattcaattgtgttatcgtgtttacgctggtgttgaaaaaaccaagtacgttgatcattttgcgttcttagttaatcactggtttttatcagactttgatttgacactatttgtaattaaagacaataatatatcttcaacagcaatttgtaattttaatttctgttgacaaaaacacaatcgattatagtctcacttcattttggcataatctttgtcagaagttggataataatcattttccttataataatctgtcctgtttggattcttaagtgctggtttatgggtacttgtattcatttgtaaattcaaccactcaagacaaaccacagtgcgagagaaagaagaggtcaactatgaatccacaaccgaaagaaactaatcgaagctccatctcctcgggagcaagaaacagtgctggcagtgcttcttcaaataacagtatctcaagtaaaaatagcggtagggagttacaaccacgaagcgataccgatagcgaatggcaagacgttggtatgcccacttttaaagaggactattccatagatgcaattacgaagaaggtgaaacctgggaaaaagggtttccattctgctatagttcgtgatgctggatcattcgcgcacaatcctcaaccacctttggcaaaaccggtgaaacccacttttgaaaggtcccggactgcaaacctgaccgcaacttcatcaagaggtaacctgccgctactttcgcgcacttccagtacgctgtcagtatcaacagctacttcacatggacataaaggaactaccaaaccgtcacgtgcaactaatttcttcaagaaacttaccagcaggaaatcatctctggcaagccaaggagggcctccagattcagataatcaaataagccaaggtggcagagtgtcggcttcagatggtgaacagcagtcaccctttcatcaacagtctctgcaacagcaagttcccactaacgctttgcggagaaagatgagcacattcatacatggttcttcaaccatgtctgcggcgtctactttgacatccgcaaatgctcctcatatgaaacactctgggtctaagggcagctccctgttacattcaggtaacgaagccagcaatggttcaaatttaagcggtgggaatgcgacaagtggcgtttcgaaccaacaacatggagtaagttctgcaggcagaagtattgacacagacctgtcaagaagaaattcagggacctcatttgatgcttctaaattatcagccgctaaagaaatatttggtgttgacctagatttagacaaactttctgatatgacggatgtcgtcgttacttctaatgcaccctccgcagaaactacggacaaagttccaccaaaatcacctaatgcgtcacaagataccaaggatgctacacttgcgctacggaaacaatggactgctccagaatcctgggatgttgatgagacggtcggtcttgatgttaacaaaattaaagaaagacataagatgtcaaaggccaatcgacatagagggaaaaaccgcaaaaggtacagcaaatcacaaggaaaacataccaaggggtctgttccaaaaaatgtcattgcgaaagatacttcggagccagtaattcctcatgtacaccatcatgactttgaagaagacgcattgtcaccgcgcacttctcctcctaacagaggatcgaatgacgaatcgggactgcatttatcagaaacgaaaagctccgaatgcgatctttgtttcacaatttctcccaacggcgacgaagactcagacatttccattgaaacccaatcagaaagcctagacgatataacttctgctaagacgcaatctcgaccaggttcgcctctatcacaaaaaaatatcgaacaatatacagaactagatggagaaaccgaatacgaagaacatatgcttgagaagtattatagtgatctttcggatattgaccaaaccaaaaaatatgctattagaatcttcaatgtcgatgatactttcacaaccctttcatgtcgtccaaatacatctgtggccgaacttataccacaaataaagaaaaagtttaatattcaacaggggaatttccagttgtcgttgaaggttggtaaactatctaagattttacgaccaactgcaaatccaatcctcatccagatcaagttattactattgaatggttacaagaagagtgatccgctccatattttggggctcgaagatgtcagctttgtttttagtttcaaattccacccggtgaccacttcccaattaacaatagaacaacaacagaggctctcgaagggtgacttcattcatgttgacttgagaaacatggacttaactacacctcctatcattttttatcagcatacttctgaaatcgagagtttggatgtttctaataacgctaatatctttttacctatcgatttcattgaaagtgccgttaagctatccagtttgagaatggttaatgtcagggcatctaggttcccagccaacattacacaggcttatgatttagtttccttggacctagagagaaactttatcaaaagggtaccggaatccatctccaagttgtccaatcttactattttgaaccttcaatgtaaccagttagacagacttccatctggatttaagaatctcaagaacttgcagttgttggatatctcctccaatgcatttacggcgtaccccgaagttatcaataggtgtacaaacttattacaggttgatctttcatacaataagataaattcacttccactttccatcaacgaactaagtaagttggcgaagatgaacctatccaacaataaaattcaagctgttcccgatttgtcaggtatggcaaacctacggactctcaatctaaaaaacaatagaattgccactatcaaatcaaacgccccaaatttgcagaatttattcttaacctcaaacagaatttccgtttgggaagattcactacctaaactaagaagctgcgatttgacagaaaatcctgttacttcgttcgactatagaggtaatgtgttatctaaccttacaagtttatctctaaacaaggcaaaactatccagtttacctatcgattttttgaaaactttagaaaagcttgagaagcttgaattaaatgacaataacttaacaagtttacctgcggaaatcaagtactcaaaaaaactaattcatttttctgccgccaacaacaagttggatagtattccggaagaaataggagaactctccaatcttaaatcacttgatttacattgtaataatattagagaattacccatttcaattgtaaatttagagctaacaacattaaatttctcctctaatttacttggctacaaccccggattagaggactatgaaaatacccctttatcaaaatcattactatttctcaatactgctgacaacaatctcaataatgagatgcttcctttattcaacttcaacactagcttgaagataatcaatctttcttataatgatatttctgatatttctgcattaaacctaccatcgttgacagagttgtatctatccggcaatgctatcaccagcttgcccggtgaagtgttccaaagaatgaagaatttgaaggtgataatgttaaatggtaataagctgatgtcactaccatcggagctctctcaactttcgaatttgacagttctagatgttggttcaaatcaattaaaatacaatatctcaaactaccattatgattggaactggatgaataatttgaacctaaaatatttgaacttttctgggaataaaaggttcgaaataaagtcaatgattggccctgatactaaaacagatttgtccgacttgacaatcttaaaacagttaaaaattttggggttgatggatgttacaatgaaaacctccaaggttcctgacgatggtgtcaactttcgtctaagaactaccggatccatgattaatggtatgaagtatggtgttgctgatactttgggtaaaaagagctccgtgtcaactagagatatcaagtacgaaagatttagaggcaaggatgatgagtgcttgttctgtctttacgatagtgtgaatgaaaacgcctcttctggtcataaaatctcacaaatcatcagagacatatacgataagattttaacaagagctttggaaaaatatggagacgatactgacgaaaacataaggacagcattgcggttcagtttcttacagcttaacaaagaaattaacgggatgttggtgtctgttgaaaatggcctgaacaaatctgaattaactaccgttgatttgctcagtggtgcatctgcaacagtcgtatttttcaaaggcaagtcagtgtatacagcgaacattggtaacatcggagctattctagcgaaaaataatggtgattacgaggttttgactaggttgcatgttcctactaagagagatgaatatgaaagaataagaattgcaggcggttatgtcaatagtgaaaaattagatggtgtttctgaagtttctagagccgtaggattcttcgatttactgcctcatattcatgcatctccagatatttcggatttcaagttgaccttctcagatcagatgataattattgcatcacataatctttggaattatatcggttatgaaattgcatctgatattgctcgtgagaatggctcagaacctatgctggctgcggaaaagttgaaagactatgccataacttatggctgtactgataaattgacagttgtctgtataagtgtggaaaagggtgctactgaaacgaatagattcaatataagcaaaaaagatttgttatcgagaaaaactgcatttgaagatagttctctcagaaggcttcaacctgagatcccccctcccacaggtaatgttgccattgttttcaccgatataaagaattccactttcatttgggaattattccctgatgcgatgagaaccgctatcaaaacacataacgaaataatgcgtagacaactacgtatttttggtggttatgaggtgaagactgaaggtgatgcattcatggtagcattcccaacacctacgagtgctttggtctggtgtttaagtgttcaattgaaacttttggaggctgaatggccgggtgagataacatctatcagggacggttgtttgatcacggacactagcggcaacaaaatttatcaaggtctttcagtgcgtatgggtatccactggggttgtcctgtgccagaagtcgatgttgttaccaagagaatggattatctaggccctgttgtgaataaagctgcaagagtctctggtattgctgatggaggacaggtcatgctcagtaatgattttatggtagagtttaagaagattttaagctaccaccagcaagtcactgaagataatattccgctcgcaaaagcctacggggaagacattgtgggtgaaattttagaacgagaaatacacatattatcgtctataggatggatgttcgtcgagcttggtgaacaaacgttgaaagggttggaaactaaagaacttgtcaccatagcatatcctaaatcacttcaagcgagacacactttggcaacacaagatcagaataacagtgttatttcagatgattttctattccaaattagatcagtgtccaatagattggagactgtcctctcctcagtccaaggtggtcttatcgggctggaaaattctgccaatggacgatatactacctttgatagtaataccaaacaggccgttatgaaaaactcgtccgaagcagatcttcttgcattccttgaccatttaatcacccgaattgaatcgtcagtcgtcttaatgaacttacgccaacaggtccagggtggtttaaccatatacaaatctggtgatgcaatgaaacagaaatcaatcttccaattgctggatgaccttctagccagaaaccaattatacatagaaaacagccataatgacgagagcgagcaacaaagcttcaaatcttttccggaggagtagaggacttgatttctttattgttacgtcgaaaatgtctcatggtttcggaccctttgattaattgtcgtgatttcatcaagaataatataacacatttccattacataagtatataaacatgcaaaactttttatttttgtgcttctagatctctaagttcgatgcttttccctggaacttgagaagctggctggctggcactggcaggtgcagaatcgtcatccaccataccttcgaaaaatgtgtctttcaactctctccacctggtaatccaagtcccaaggaaaatcaatatcagtgtagacaaaaattgcaagataaaccatgctagtgaagggaatagccctgtgtgtgtccatactactactagatttatagcatggattgtaatggcaaaatcccacgcgagtttactccttcccactatgatggtcaaaaaaaagacacaaatcaaggaatcaattaaccaaagggctgataaagaaataccaaaagagtttgagaaatcaatgtcctgccatgtaaacaaccattgctttagctttatttcgtacccacatattttcgcccagcaataaaacaaagttgatgcagtgagataatagaacatttgcaagagtataatctgaacgattattttaccaggggactgagactcttgtttgaagatttcagtgggtaatagttctctcggaacacgcatgtatcgtctaagcgaagccatctccctgattggttgaaatgtctctaatcggtcgcctttctaaaactgcacttggtacagttcaattctatcaaatataactggtgcgaacaaccaaaagaattcaccgaatattataggaggaatgcaataagtaacgaaagaggactaactactcaattctgtctttattttcaagtctctcaaatcatgtctcaatcacaactcatcttggatttaatatgttgcttagagattccgaactagtttccatgttgacaaccagtggttaccctaacttgacgatatgtttttcctcaaaagaaattttccatgttcaagcttttcacatctggaatggcgatgagatgagcttgagatgagctacgacaactagaataacttagcagtgagtactgttcattgttccttattataacttctacaggtgacatactatttatctagtgctattattcttcactcatttctactttgcgagaaagaatagaattcttgttgttctttgattgagtattaaggtaagtggaaaataaagagatatacggcattcgttaatatggctgttaagaagtttagatcattcgatgattttgttcctacaattagtgatagcgaagaagatgttccagatttagatgcttctgatgacgaaatggaaaagaagccagtgaagtcctcaaaaactaagaacaaatctaaaaagaaggccaagcaacaacagggatctcacttggacgaagatgtccatgaagatttgaatccagaattccaattctccattgacagcggagaagttaccaccaactttgcaggctgggatttccaaggtgatgagaagagtgatgaagttgagaaaaaagatgtcgatctagatgggatcattagaagaaaaggtggtttgattatgatggctgctacaggcagtgatgccgaagaaagcctatcagaagagtccgaagaagaaccagaagaaggagacgaacctggcgagagtgatgatgaagatgaattagctttggatgggttcggtatgggtgtcaagagaaaggcaacagaggaaaatgaagaagatgaagaggatgaagaagaagaggatgacgacgaagatgacgacaaaaagaccgaaatgagtcaggcagatttaggtaagggaaaagacgaagatgaagacattgaagaagacactaaagaagaaatggctgaattttatgctccagaagaggaaagtgcggatgctaaaaagatcgttcataaaactttcaacagcttgtcgttatcccgtcctgtgttgaaagggcttggaagtttaggatacaccagtccttctccaattcaaagtgctgctattcctattgcccttcttggtaaagatatcattgccggtgctgttacaggttctggtaaaacagctgcttttatgattcctatcatcgaacgtttgttgtacaaacctgcacatattgcatcaacaagggttgttgtactaactccaacccgtgaattggctattcaagtggctgatgttggtaaaaatatcggtaagtttgttaacggactaacgtttggtttggccgtcggtggtttgaatttaagacaacaagaacaagcattgaagaccagacctgatatcgtaattgccacaccaggtagatttatcgatcatttaagaaattctgcgagtttcagcgttgattcagttgaaatcttggtcattgacgaagctgatagaatgttagaagaaggtttccaagaggaactacaagaaatcatgtctctcattccaagtaagagacaaactctgttgttttctgctacaatgaactcaaaaattaagcaattaatctcgctatctctaaagaagcctgttaggattatgattgatcctccaaaacaagcagcagataaattgacacaggagttcatccgtatacgtaaaagagatcatctcaaaccggcattattatatcaattgattagaaagttggacaatacaagccagaagagaatagtagtttttgttgctaggaaagaaactgcccataaactgagaatcgtccttgggttattgggtatgcaagttggtgaattgcatggttcgttaacccaagaacaacgtctacagtctgttaataacttcaaatccttacaagtaccagtcttaatctgtaccgatttagcttcgagaggtttagatattccaaaaattgaagtggttatcaatttcgatatgccaaaaacttacgaaatttacttacacagagttggtcgtactgccagagcgggtagagaaggtcgttcagtaacctttgtaggcgaatcatctcaagatagaagtattgtcagaagtgcgatcagatcagtggaagaaaacgctgaaagtggaaaggccttgagtagaaacgttgactggacacaagtcgagcaagtcaacagcttgattggagcaaagggtgatgttgtagaggagattattgaagaagaaaagcaagagaaagagatacttagagctgaaatggaacttcgcaaaggtgaaaacatgctaaaacacaaggaagaaatcagtgcaaggccaagaagaacctggtttcaatcagaagctgagaagaagaactctaaaatgcttcaagttttggcaaaaaacaaaaagccaatcaacagtaagaagagaaaacagcaagaagcattggctgagaatcctcggctatataaaaagacacaaaaagatcgtgtcgaatatcaggaacgtcaatacagcaagaagcaagctgcctacggaaagaagggaaagaagggtaagaaataaattactgtcctatgttcttagttttggcttaattatcaatgcgcatgaaaattcattatatactacataaacgcagttgaggtgttattacataatcatcaactctcattcgtaatatatacccatcgagagttgctttagagtttctggattgtaataaaagtcatccgtttcctcctctgagaaggattccagtgactcatcatctctaaatttatcatcaagagcagcaagttggacgttccttcttaattttattaatgtatcgatttgtttctcagtttctggtgataatttggcgtgtttactttgtgataataattgtaaaccatccaaccaggtgtagaagctctctgtactctccaagtaaaatgcagataaaattttcccgtttctgtcaaaggtggtaacttctctataaattgtgttctgaagaatattaatcaatctaacaccttcaggaagctttctatcgagttcaatttgcctactttgaatgtttataatattctttaacggaatgacagtagttttgttatttaccatggcagagtgatcgatggtcactatttcattatcttcaacagtgggtgtcttttccaccttatgtttgaattcttttatcaataaattcatctgattatctgataatgcaataaatgaaacctttggtaatttatcctttgcttcaattgggttctctgagtacacccatgtacccttctgcatcaataaaagtctttggtagcgtacaaattcctgcacttggttttgtaaaatctcatcaaagctactaatatcttctgcccagtcattgaactgtttttctctccattctgctacctgcagctgtcttaaatcttcgtacgtaaatgtctcacatacctcaacgaatgtttcaacaaaagaatcgtgttttgtgcggcatatcttatctgccttatgaatcagtattttaataagttcaagcaaagattcaaaatcttcttcagtttcactcctggacttatcccatagcgtcaccatagtaccaagaagcacggcaatgatttctttagtgaaaaatatgaagtgcatcttgtgaacctttgagcctaatttcaagtttgacatttcgaagtaatcccaaacaattacggataaacgggcaacagttttcaagagtggtaaaggatattcttcgaacataagttgttctgtgtaagcttttttgaatgttagatcgttttgtcttaagataaatcggatgttaagcagttgcaacactgttaggccgtccaaatcagtgtactcttcatttgatttcataaacctctcctgggtgatttcatagacgtcaaaaagtttgtgtatcaattcctttaccacatcagtcgcttctaaatcatattcattattaggcaagtcttttactgctccttttaagcgtttcaactggaccagaaactgttcaatggaacctactagatccttattgtgctcatgcgcatacaacagacaagacaattcgttaagaactcccacatcctcaagcatcatgttagttcttgctacaaatgtcactgcagtcttgtcgccttctgaaacccattggaggatgcattcaacatgaagacataggtatttaatgatttcctgacctgtagttggattattctcatatgtctttaaaaggcaaacaaactgttctaaaagatctggaccagagtgtagaactgaacacagcacagttaaggaaatttgtgatgagggcggatgtaacaccaagttttcacttagtagagtaagaactgacagtgatgcgtgcagagtgatcaggtctttactttgagtagaaatgataagaccatataatcgactgattaattcatccgtaattcttggcttccacagatcggttgcagccaattccgataaatgtcctaacccggttaacaacaatgcttcatctgtttcgctctgtgagaaagctgatgcaataatcacgtcaagatacttttctgcagtatcttgctctagcataactccatggtcattttgaaccttatggttctccatatcatgtataattgtctccattatgaaaatagtctgtatgaagaataaatggctggtcgctttcttgaaccaatacagatcaacaaggccctcttgatgactcttgattgtcttatacgctcgagaagatatgatgttatacaagttttaatcctgagatctgtttttgagatgagaagtaactgaatcattttcaatttttcacagtgttccccagagaacggttttgtcagatcataaaggaatgccacagagaaagaaaatggaataaataaaataaaagggccagacgaggttcgaatggaggattgaaatgtgaaggttttacgttaagaaaagtgagcgaagaatatctgacaggaaacatcaaacaaaactagcagtgatttacagtaaataacagatgtaatacgccatctctaggacgtttaacctcaatcggacacttattcacgtctagaaatttgctttaagtatatttgattattttaatttttatattatatcaaattgatcaggtatacacgtttccggtttgggttcagattataaggaaatggagatgtctgagcttcttgcaagcgaagttgtatcttccggcccggattacgcgaaaaaatctgtagatggattgaatatgactgcagctaatggaacaaatgatacattgatgactttggacgagtatttgaataaatcgttgcccttacaccttgagcagttgattttggatgccaatcaaaaggaactatttgattcagctgcgaaatcgttactatcatcaactttgttggctaaacagcagcagtcgctgcaaattgcgcccattcagccccaatcatcgttctcttcccagtcatttgctgagggtctcatagtgggtcaattaagtgtgatagtagctttgatttttgttatcaaattcttcgtgtttagtgaaggcggtactaagacagctaccgccaaaagtgttggttcagcatcatctttcatggattctactaagaacagcatactttcaacaattataaaaagaggagggaaggatggattggaagttgatgataaggacaatgaaaaatcaagacagatcaattcaatcttggaaaagacatactataatgttgaaacacactccccagaatcattggactggtttaacgtccttattgctcaaacaatccatcaatttagggaagaagccctacaaaagaataatatactaaactcattgaatgattttattgaaagaagatcaaacgagcttcctcaatatcttgatcagattaaaattacagaggtagatattggagatgatttccccatattttcaaattgtataatccaatattcacctaattctaataagaagcgtcttgaagccaaaattgatatcgacttaagtgatagattggctctggggatcgagacgaaattattgctaaactatccgaagccattttcagcagcactacccataaaattgactgtttccatcgttcgatttcaagcgtgcttaacagtatctttaacgactgacgaacaattcgtaccgacatctgaggaaacaaatgatgatgaaatgggaaacgataaaggatattatttgatgttctctttcaatcctgaatacaggatggaattagaggtaaaatcattgattggtgcccgttcgaaactggaaaatatacctaaaattgccagtcttatcgaatatcagataagtaaatggtttgtggaaaggtgcgtagagcctagatttcagtttgtgaagcttccaagcatgtggccacggagcaagaataccagaaaggaaaagaccgacactgatgattctgtttcagtgaaatctaacgactaatcgtatggattacctactacaatgactttaccaatcttgtcaacaaaagcattttgatgtgtaaactcgatattgtatctcaattgccataagttagcatcagaaattgcaaacccgttatcatccaatggaatccacatcttatgggttttaggttctaaatcacgcaatttgaaatcttcctgctgatgctggacttcatccgatgccaaacttgcaggaagatacttgatggtcgatttagagaggtttgacacctggaagtgcgcactgatagtgaatatcatgaaaatgaacataaataatgacaatttaaaacaatttgctagggcaaatagccctatcaaacatgcctcaaggaaatatattccagaatacaattgcatcaatgcttgtggatagaacttgcccaatgtctctgatttatttttatgatcaaattgatacttcaacgaatatttgaaagagaacatgacaaaaatgaaagaaaaactagccaatggtagtacaaatggtgcgataacggagtaaataattgtaatacttgccaatactgaaaaaatgggatataaagatccccactggtaacaagggacatttaatttgtacttcaatttttcccttggtgttctgtttgaccacctataatagaataaataaaagaaaaggttcttcgactgcaaaagattaccaccaaagtatgctatacctctgatcaatacaaatgaacagaagaagttcgaacatttaggtaaatttgttcccaacaaatgtggaatatttattggattattcaccactgtttcaacaacaactgaaatatcagaggaaatagttacgacgagaaatatatgaacaaacaagaatgcaaagaaccatttctgaacatccatttcaatttgtgcaccagttttcaaacatttaaccacactaaaccacctaaagaaaagaggcactccttcagtcaagaagattaaagtaactgctggcacaatgctggcaataggctttgacataaattcaggcaaatcctggaagtttgttagaatgggtacgattttggtgataataggaatttgggagacaaatccaacaatggcgactggcacaacccaaccaatgatgatcgcaacgtttaagaaattcgatattgcaacccttaatagagcccaaggtctatttatggtttgaatattgcaccaaataatatctgttggattaatacctagagctttatcatcactcatttctgagtccttattagataacaacatttggtcaaagatatgtgcaaatgatacttttctgaaaactataaaagcttgtctggaacttttcctgttaacgtcacattccatctcttgttgcatcaaagactgttcgtacttcttcatgtactgatctaatttaatttgcttcttttctattatttgttgagcgctccattccaaatgacctggttcaaaccattttgcttccttatcacgttgaaatcgaaaccccaataacatattaccgttgataagttcttttaagagaaataaagttcttttccaattataaacgagcctgtggtattttattttacaatgcacccttttatgatacatgtagggaaattgatataaagggaaacgtgccaaagagttgcgcttctcataatcaatgggtaaatcataggaagctgctttagaagctggtaaaaaagttttcgttaacatgatatccaattgtctattctcaatctggtttgtcaacctatctaattgttgaccgagagcttttgttacttcccaattatcaggtaattgcacaattttctcgacacaccctggtattaaagattcacagaaatactctattttatttttattaaagtctttgctgatattaccgatataaagaacgttttgatgataactggatgcttcaattgatcctgttagaactttatttctttcggagacatagtacttcaattcccgaagcaatacgtgatgaaaaaaacacaccaacaaaaccgctaaaatcagatgaaaaaccaaacgattactgtgagcgggtgatatatttgacattgaaatcttatccaatcctgtcaggccatatggtaagtgattcaacatttcatcattcgttaatttatcgttaagctccatttgtgatatataactctggatatcagcagttttataccctgaaatgtaatgaatgggaattaatattgggatgatgactatcgacaatataagaaagaacatagatagtgttttcaataaacgtaagaaaaaataagcatccaatcctgattctcgacattcttcaatagatgttgtccaagtcggtttgatccatgaccacggtttgttacccaatggtttcgctagtgatcttttattctgttctgtattcccacttgcaactgtgtcattttttttatttggatacaaacttgtgtttggctggtatatgtgagttaacctatttcgcaatatgctgaagagtatgacttggattatgcaaaaaacaagagacactaaaacacctgaaatgaatgaagaaaaggttatcccaaattgccgttgtgcactaccagagcgcgtattggataataaagttttgagtaaccccgatgtataatttctgtatcgggattgcaaaggagacgtttcttctttgtaattaagaaccaatattgccgtgttgtcatcaacttcaacatatttatagattattttccttaaataatccagagcagtaacatcgttatcatgattcatctcaaagcctagttggtccctggccaatgtgtcggagacgaacccaaccaagcgcggttaatattgatgaatagtagaagtctttcatgagctttgtgaaatgatagcttttcaccccactatgttacatgtcacaaaaaaatgacagcaagctaaattgtttgacaatcaccaaacaagacttttatactaagaaagtaattacctccaactttgctatccagtgcgagtgaattgttatcactttttgattttggggtcatcagaatgacgacagcattaatttttgtgatcatgatctaatttaataaactattttattttataaaatatataactttacgtggatagtgaaagtgcttgaaataaaagcttttcctatattaaccataatttaatgattttctggatgtttcgttatgaagatgtgatcaatctgagatagtccaggttgataaccagtttaggtattcgtaatcggtgcttggaccggacataccgaaagaaattggggcaaagtagtagaagccataaattacgatagccatgtatgagccataaatggtgtatctcattacctttccgcacttagatttgttccatttcttcatcgagatttcgaacaagtatgccaacactaataaagcgaagtataatgctggcaagtaatggtggacgtaagtaactctactcatgataataaatggaacaaagtgcaagccccaagccaacaatggatagataccacccatcaagaataaattaatatcttctggatttgttaggtcagagtattgacgttgccatctaatcaagtacacggcaaccaaaaccataaatgctagaacggcgatagtagatggccaggtagaagctggtgaaccaattaagaaatatttgatgttctgttcaccccatccacaaagtctgataccgacatttagagttggccattgccaagcggaagatgctaatttgtccaacttttcagcatttggaaccaatgcgttgttggtagccatcatagccaagttcagatgaataaaatctttgatgaaactagtctttgggtatttgaagttttcaggtcttggaggtaatttttcgttgacgttcgtttcaatattccaccaagttctcttgtctctcttgaaaggattcttaacacaagcgacttcattttgtctaaaaccccattgtggcaaagtgtttcctgtttgagataggtagcaacccatttccgcatttttcaatctgaaagaagaagtcaatggatgtaattttgtttcgtcttcaggacccttttggtcaacgatttcgatgatccagtcatcctttggatcaccaaccttagcatcaccgtaaccggaaacttcccaagcattggcttgaacaggggctctatgaggatgggtgtgtaaatttcttcctgtgttgagatgaactaaacggtatctagcaccatcggtgacaaactcagtttctgtttcgtttttgtcatatggtgcgctgaatctttgtctgtcaaacgtccagacgttattactatctttgtggccatatgtggtaacttgttgttgctgagaaccttctggataggtctggatatgagagtgcaatagaccacctcctagggcctggttcttgatagtaatttcagatgaacctaaagcgacgtcacgtggcccttcaccaacatcggaaccaatcaagtttgcttggaacaaggatggcatattagcatcaccagtaccagaatgggacaaaagatcgaaatggatcttgaaacatgctaaaaatacggcaaatggaaccaagattaaaaacacaaatctggaagcccagtgagcagcgtataccttttttgacatcttagtatctgccaacatgttccatagatcaaccactgtgtagatacccaccatagtaatgatcaacagaccgaccatcttaacagagatggtacaaccaagagagaacccagtgtagaataaccatttccaccactttttagtgaacggtttagatctaacgttgtggaacttcacgaaacaaaacatggacaatacagtgaagaacaaaagcatcgaatctaatagaataaatctgcctagcgtggtgtaagagttttcaaataaaactaaggtagtaaacaaccaaacggttggtaacgagaagccaattgacttagcagtgaaataagcaactggaacacataatgcagaaaacagagcattgaataatctcatcttgacaaaatcaatgtactctgggtattgctcaccagacgggaaatcccatgaaccgttgtaaccggccaagtaaccggaaaaaccgaccaacatcttacccagtggtggatgcacatcatgatagaattcgtgtcttaaatagtaagatccaaacttaccgaaatgtgcctcatcccaaacaacatggtcattagcgccgatcttgtacattctgatgaaaaaggcaagacctgtaaagataattggcatcaaaattgactccagtttcaacaatggactttcgttgacatgcttctgctttgaaagatcttcagcttcaggcaaaacttcaacttcctcaacaacatctttgcctctgtgtctcaagctgctctgcaactcgtctccagataatgatgctgacatttcctgtaggtcaattcgtcttatcgggcctttcaaactaaacaagatcaaaataatgaacgaatttttgcaacattcacgaactgatatttacttcagttcatgttaatcaaaaaaaacacttcgttaactttatataatatcgacgtgttcagtttttcggtttttttcaagaaaaaaaaggtgaaaaacatcatatacaaggcaaggagctagtcatgtgacctgcatggcaacagggtcttgcaatgtgacacgaagtagttagaactaaggataataggagtgccgatagttctaatatatagtagatagactttcactaaatttctctctttaacagtgaatattatagtatattacatctgtgaaatgatatatgcaaataagtaactgataacactgccagacgctagaccgattgacaaaaacacattggtaatgcctcctgcggcttttctttcgtcttctgtatctaatgatctgccgacgttcatgaaactacagctcgccaagagtccgttggtcaatccaaacatgaattgccagaaactgtaggatagatcgagaaacacaccaagatgtgaattctttctaatgtttcttacgttgaataggaaaaacaccgcaaccattaggatacgtagctgagagtagatgaatatcttacgtggagttagcattttggaattgaaagtatgttctgcgatgattcttccaactaaatcgccaatgttccaaagcatgaatatgaatggaatgaattcagaattccttaacgggaatcttaccacgtacgtgtttgatgcaaatactgggaaaattaacgtaacgcagaagatggtaaatatagagagcacaaggtaccttaatttcaggaaaagcactttgaatgggacgtaaaccttaggctcatcagctgtccgctgagccatatctcctccaatgataggtatatcactttttttatatgccacgatggatgcaaacgacatgacactagtggataagaaatatagattgatacctgtcgctgtttgttcctgtttttgattgaagatcgagaccatgaagagcactagcgacggtagtacccctgcgacggcttgtcccaccatcactgcatgattgtattctggtccgaaaacgttagccatagccatgacaccggtttgagagagtgcagttgcaacggaactgacaagcactagaaacataatcatgatgaatgacagtaagtgggataaccaacgatggaatagtaccacaccacataatgaagtaaatacaataatttcgaagaacaatccactaacaattctttcagtgtaatgatgttgaattttggataaaattatgttagacagtaccgatgatatcgtactaactgtcatcatggtactgatgtaaatccttgcatacaccgacgtgtcttgaaatacatcatgctggaaatataatgacgcacttaagaatgagttccacggccaaagtaatgcaataccgataaggaaaaatgcaagataattagtatcagtaagcttgatgtatgtagattctttggaaaggtccttggtttgtatttgggaaataggatcatttaatgcagttcccgttattggagtttcgtcattttcttctagttccataattcgatgaaatatttggtgtattaattttccccttgagtctatttattcaaaatacagaccagccaatgtatatattgaccaagtactaattaaaatcccttcatcagtaattttgtagcttgcatcattatgttttcccataaaacaacaattttctgaaggaattcctgtttagtttccaaaaatatgataaggaatttacaaaaaaatcacttaatccgtccagagacaggaaaagaaaaagtgagaaagcctgtcagttatacttggaatagactttaaaacattaatatacagaagaaaataaagactaacgttataaatgatgaagtattagttgaaatgatgggataaaccggttttaacatcctaaaaaaaaaaggcacttcttagaatatcatttctttggtggattttaccggcacatatggttttgttgtatcaattgagaaaggacacaagatgtctgatgtatcttctattgataacgttaaatgaaatttacaattacaagagcaggatgaaagtgaatgtggcaataactggtatagatatcttgataaagccagcaataaagggaacaaaaagaagtgaaacatgattgtaaataaaattagtacaattacactttcctgctggatgtttgggtggcgttaccccttgaaatttcaaatcttgtgacaagagggatgtggtcacttgggaacttatcgttagggaacccaataaacttggatgcatactcctcgtcgatcttccctagtaatccgcgaacacgtagtgattgagaggaataccagatataatcgatgacgtcggtgaaggagggtgtcatatttgtgaatggtagttcaccaatggcgccgtaacttgatctgagcgacaaattatgcgagaaattcttctgtgacatataaccgaaatctctttgatcaatatctttatggtttgccgtgacgtgaccactgttgaataattctacaacagcagagtctaattgggagttaaaatcaccacagatgaccataggaatcttctttatgtcattgttattgtttacatggtggtgctgtttgattaaagtctctaaatagtccagcatcacgccaacttggaaagttttaacatcattaaattgtggatcccaatgtaaatgagtagtgaccacccacacattttcgtttgtattcaaatgctttagttctgcgattagcgcaacattgtccttattcatagcacgattcaaataatcttctgtacgatggaattttttatggcttctccaagcagaactaaaatcaattgaatcttggaagaccaattggaattgatccttcttgtagaaaatagcacaaccatcgacctttttggaatccttggcgtgcattgtcttggctctggtcttagcgtggaacaagcaactatagttatatttttccataagaggaacccaatattcctcatatgttaaagtttcaacttcttgcaaacatataacatctgtgtcaaaatctagtaactgttctttcaacttttctcttctgtaatcccagcttaacgcccaagatggagtgaaacggtacatctttggagtagcataatgatgacacaacgtattgtaagataacaatgtgaagctattcttcaataaagtattgttcatgtgatttgtattctcttgtaatgactcgtattcgttagttggctcgccatcagctgatatttcaataaattttctatccttggcatatgggatttcaggcgcattatctctgaggtaaaagattaatccagtgacagacttttcagctataattttcacgagttgtttatcaagaggattgccctccaaacccaaaaactgcaagttaaacaaattaccaaattcccaggggattgttgtgatcatattgtcaaagaaatataaatatttcaactgatagcacatacctaactcttttggtagttctgtcaacctattatgagacaagtctaacactcttagatttctgagttttttgatggaagagggtaatgaagtaaggctattaccatttaaatataaacgtgtcaaaaattcgtaatggaacagtttttcgttaagattgaaaagggccaagttggaaaggtctaacgcgtgccataattgatcatcatgtttagagttcgttggagctaccatgcgatgttcaatttcatcgtcttcgtcgatattatattgagacagcttcttgtgttgcagaagtagagaaggtgtatttggatgaagctctgcttttggagtattcggagttgagaaccctgtagagtttagatcagaattgacattaacagcagatgcagtagcttcattaccggatgaggccatctccataagatgttgtttagtgtgctcgactaaagacatggatgcgtcattacctaaaggttgctgaccttgttgctgaccagattgacttggttgttgttgctggccctgctgctgttgtgactgaacgccatcttggccattagtagacagtcccaactgattttgattatttaagaacttcttcatggcgttttgtctagcatacacattcgattgacccaaagactgtctggaaactgcagccaattgaagctgtaacttccaaattggtgaattcaacaacgaggggtccgctaaatgtggatggcataacggattattagcattggacaattgctgagccactaacgcagcctgggctgcattaggtgttccaacattaggaggacccacagcttgctgtggtccccctgcaccgccagttatcacattctgaacctggttcatcatcataggaaggacattgtttagttgggccggctgatgttggtttccttgatttcccatcaaacctggcggatgctggtgaagctgctgagtaacagcttgcggcgtacccaccatctgaggcaccgcttgcccagcaggtttctggaatcctgacaagggaggcggataattcatttgcaccaattcaattataatgtgttgataatagtttcaatttttttcactgctgttattcgttgattcctgtttaaacttctattcgttgttatttccagcttttctaaatatcaatatcagtttagaatcttacaactctcaaaatatgcccaatgaccagttcttatttcttaatatgttttcggtttagtatctcgattatattaaattctcctcttatatcaaataaaaaaagcacagtcagtacagtaataactagtcgtctgatgaggctgtaaagcttccttagttgccgaagtctatgtcttttaatgtttaatgttttaatttcaatataagatttatttagttctttcaaagaaaaaacaaagtcttaaaaaccgtttgataaaaggaaaacaagaaaaaacactcagtagaacctgtgcagaagtggaaacaaagagaggtaacaatattagtgagtggtaaataaagaaccggggcacaggtagatgcacaattggtgtagctctgatctttaaatgccaatgttcttttctatgttgttgagaatattccagtttctgtaactatcgggggttagagcttgcttgttactgaagaagtgacagctgttgccactctggtctcgatacgctctactctgagctttcgtcattttgatcgttttattatattacccggaccacatatctgattatggcgaggattatcaacagttgtactattacccggacttaatttattcgtgtaacgatacgcgggttactattgttcacggatatagcaagatagcataacaataaaacagtacaagagattcctgatttgcgatagttataataggtgctctaatattacgagcaatacccagttaattgcagtaaataaaccatttacagttactaaggccctatttcttgtgaaggacttatgtataaaaagaaaaattgaacgttttaaaataaaaaaaacgaaaagtatctgaaagttcatcgcacacaacatacttacaatatgataactcgttattaacagttgtatcgtttattatttttcttctaaaaagatcagtaagaacttggataagtgattatctgggttcttgcaagggacttttaaagaaactgggctactaatcatcgtattgatttatctttctctgttgttttcgaataggaaagtgtgatttttactttgatttctagttgtttgggtgatacgagtctctagacatcaataatcaagaagtctatacatattttccatgtgagccgcctggtattttcattaattgccatggttgtatattttatattttcaacatgaatatgggaaaggtacttcttaacattttgttacatagatgcatatatacattagagagcgttcttctctttgctaagagaaaataatcggtgctcacgtaaccaacactaaccatgtggtcgcacatcctccgaagatgctaacaactttttcgtattttcctatcatattaagggggctgataacgttactcttgtcattgatcggatttgtctctgtcttgaataaagacccacaattaccgtgctctccccagccccaacaatatactttcatgtcagcagtagttactaccccatgctcactaccagtaacaaaatccagagtttctgaaggcagaggttcttccaaaaactggccatgagaacctcgtccaatggatataagctttcgttcaccagtaagaatgtgtaacgaggaccacatagagtcaatcttggcaattgatccgaaatcatgcgacaactgtgatatcaattcgggaagttcttttgctaatgacccttttataattaatttattttcagttctggaaagtacacaggtaaagtcctttcctaaagccatctcgatatcagacgtatccccctcataaatcacctttggttcctcaatgattttcaaggctgagtcgtcacacacttgtagcttcctattattgccccatccgtatatcttctccggaacaaccactacgcaatgctggaaagttgcataacatcgggagccttttggatcttcacatcggaacagatcaatccattctgtactgtgtttcaacctaggtacccctaattcgcctttatcaccccttccacgggttttaacccagccatcctcatcaataactatagtaacttcccaaccacatgcaatatcgagaaatttccctggaatagggatccattcgagacttattttaatgtcactggaagcgcattgaccagaagagttatcgccacaccaatacaacgacccatcttctaataatagtagcgaatggttgcccccacatgacacttttttaataccaacaccatcactttgaaagctcaattgaggcagcatcaagtcctcatcgtgtcctacacccaattggccattcccattggaaccaaaacatagtaattcgtaacttgccatatgtcaagagaaacacaatattacgaatgagcacgccgatttgagtcggtatggctgtgtcaggtagttgcaagtgtcatgacataccaaaacaccacattcgtttacagctgatgcacatttgatatgcaacgagtagtagaaaaggctaaatgcagttggctgacagatttccggtttctatctggtaaataattcctgtcagtcatgtgacaaaaaacataagcagcccggagcacatcacacctgatcacgcccggggctctctgttttctccaaaaaactgttaacacgttcggaaaaatgtcgtccggataaacccttcataatttttgggaatctttaccttgaatatagacccacttcccctaccatcatatcttattctcgaccttcgcatctatggggccgaccgaagcaacttttttcgtagtaaagtgggagacatgcggaaaaatttgtaacgtggctccttgtaatgcccaagattcaaggaatcgttgggcacaacgggcccggaacaatgttctggccaaaactcattgcggtgtacagatgcttaaattattgcatatgcggtccacaaaggatatcaaccctattcttacgtagacgaattcgttgaacaacacaaccaaaaagaaaatacaataaaaaaaaatctgggccaccggagcttttcacgtagtcttccggaaaaatatctcagtttcctacaccctttcagtgcaaaaggatgtctccccacatctgaaaaagttcatttggaataatattttctccctaaggaatgtctccaaaaaaaaaaaaaaaaaaggaagcaaggtatttaccgaccagtgcgaattgaccaatagttttaccgaagctggaaaaatgttgcgtacagaaaaggcagaacatggcataatccgcagttggatgatgagctgagggtatcactcaaaagctatagtcagagctcggaagaatatccagcaggttgtttccagagcaatccctggcttcaattcatgtagtatccccggtagagtgcgtatgccaaactcacgtctcaagtgttatgtaagtaaattcgttcgttaactattcatgttcggcaacaaacccaaagtaaaaatacaactggagatgtccccctaggcctattgccatacaattgaagttcgtacgctctttgtcccgacatatctgccgtttttattgaccgtatttcactgtgtattgtttattctccgccgtttccagcctcgggttttttcccattcacactatacagagtggatttcacttctgacatatatataagtatgcataatattatacttggctccctcttttaaccaagccatacgtatgattcccaaaaatttacttaagaatacaacataccaaattcctaccatatattgttctgtatcaaactgtcatcgtattacctgtgttaggtatcacttcaaacagcaaccttttttcaaatcaccatttgtgcgtcggtctttcttccgattatccacgtagaatacagacacaaattttttccgggctcagaatttttcaattttctagatatatccatttttcctttaaaaagaacactttcaaagagacggagattatcagacgtttaaaaagagaaaaagtaagaacaagctcgaaaccgatctcctttatcgtatattttttctgataaaagcaccaaaatcccataaagtggcttaccaggttggtcgaaactctggctggttaacagagccacatatttaacgaaaacaatttacaagaggaacaaaaaagtgaatcaaaaaccggccgtaaaaattcatttgcactaaatcgaaacggcatcgagatatacacaaatattctcctacaaagatgtttgtctcacctccgcccacatcggccacaaatctattacctggggtactcgcaaaaaggaaaaccaatgacctagctacgataccagaaggtaagagtagcagttcgcatagtctaccacaggatcaacccatgcttagtaacaatggaaagaaggattttgtcaatgcccctccagagtttgccaatagagctcgtgatgagattaagagacggctattacagaaacgttcaggatcaactggtggcgccaggtcattacattcataccgcagtaatgcatcatcttcaagacaagattatggatcggatgcggcgtccattattactgggctgacgatgtcatcagggacaggttcctcgattttctcgtcaccctctttcaatacaatttctacgcaacttactgatgcgtcatctgtgatagatcaacaggactcgaaacctttgacacttacactagagcaagctttaccaacaatattctacgacatgtacagcccagatattttgatgaatcctcaaaatttgatgagcaacggaaggccgaactttactaagagagaacttttagattgggatattaatgatataaggtcgttactcataatagagtccttgaggcccgaatggaacgggaaacttcctaccatagcattcaatcaactgcagggtaacaatggtacggaaccatctattcctgagttcaggttccagttattaccactgaattccccagatgaattcatcatatcgacgttggtaagttctgatctttatatcgaagctaatcttgactacgagtttaagctaaccagtgccaaatatacagtcaattcagctaggaaaagacacgaagagctaataggccatcacgaaccagtcatgcaactatcgaagcctgaatggagaaacattatagagaactacttacttaacattgtagttgaggcacaatgtagatttgatttcaagaaggcttgttctgagtacaaaaaatggaagttagatcaactgaaacaacaagctctccaacaaaacatgattcttcagcagcaaaatactgtaaagaaacctaatatgccacctccatcaataataccgaagaagtctaagaattcgctgctcagaagggcactactaagaaactctcaaatcaagatcgaggaacaattggaacttgaacagcaacaggctttgcaacagcaacaacaacaagctcctgtgccattagtcgaagtacctacgaaagtgtctttaacaaaagacgaaaagtcaatggtctggtcccattgccaactgcaagtgtaccaaagactaggtttagattggacacctgacaatgtcagtgcaaacagaatccagtcatgatcaattggaaattacaattacggaaaactttctcattctaatgaacatatatatatatatatttttttttttttttttttaatgctatcccttcaactgcgtaccaagctaaatttatgaccatatcttgcacagtactgccttaagtgcagttattacatcacatattaacagtatataaatatttattcgtttagttcgattgtaactagtattattcaccaggtagggtaactatatttcctccatctttcgttggtttaaaatttacaaagctgcagaaattgaaaactacagaagtattaaagacatagaatagcagaggtaagctattgaagttgtctttgctaatttgtgacactgcatacccatcggtgaaaccaaaaaatcacttcaagatggcacagctaagcaaagaagccagtgatttgatggctcgtttgaacatcaaagaacctgcaaaaaaggcatctgaggacaatgacacaacatctgaaactaaggttgagaaggaagatgctaaagagactaaagctgaagaaccagcaaacaaggttattaactctgaatacgaagtgaaggttaatcttgccgatttgcaggcagatgcaaactcaccattgtatagtgtaaagtcttttgaagagcttggtctatctgaggagcttttgaaagggttgtatgcaatgaagttccaaaagccatctaagattcaagagaaagctttaccattattgattagagatcctccacataacatgattgcacaatcacaatctggtacgggtaagacggcagcattttcattgacaatgttgactcgtgtagatccaaatgtcaattcaacacaggccatctgtctatcaccagcgagagaattggctagacaaactttagaagttatccaagaaatgggtaaatttactaagacttcttcacaattagtggttccggattcattcgaaagaaataagccgataactgcaaacatagttgtcggtacacctggtacagttctcgatttgattcgtagaaaaatgttaaacttgggatcaatcaaagtcttcgtgttggatgaagcagataatatgttagacaaacaaggtctaggtgatcaatgtatccgtgtgaagaaatttttacccaagacatgtcaattagtgttgttctctgccacttttgatgacggggtacgtcaatatgccaagaagatcatcccaactgcagtttctttagaattacaaaagaatgaggtcaacgttagtgccatcaaacaattgttcatggactgtgacaacgaagaacacaaatacacaatattatctgaactttatggtctattaaccattggttcttccattattttcgtgaaaacaaagcaaactgccaacttgctatatgcaaaacttaaaaaggagggccaccaggtatcaatcttgcatggtgacttacaaagtcaagatagagatagattgatcgatgacttcagagagggtagatccaaggtcttgatcacaacaaacgttttagctcgtggtatcgacataccatccgtttccatggtcgtcaattacgatctccctacactacctaatggacaagcagacccttcaacctatgttcatagaatcggtcgtaccggtagatttggccgtaccggtgtggctatttcattcattcacgacaagaaatcgttcgaagtactatcggctatacaaaagtactttggtgatatcgaaattactaaagtcccaaccgatgatctggatgaaatggaaaccatcgttaaaaaagctttaaaggcctagagaaaagtactgtatctacttttatatacattttccctattgataccttttacagtcataataatagtaatcgattagttgaaataaaaatcaacttgaccaaaacatggaacggtttcgacgtgaagttacagatacacatatttaccactatcattctttagtgattactggcactattggatgagggtcttcagcattggcatatctcaagaccctattgcaaaacagcggaaattctgaaagggaaaaatgaaaaataaaaaaacaaactataaaaataatgaaatggcaaagagtttaaccatctaataaaccttgcccgtataaacaaaacggggccaccagcaccaaacaacaacttcaagatggattctgctaagattatcaacattattatcggtatgtcagaatgatgtgaatagaatttcttttcatacttcctggaattgagtgcgcaattgcatagcttcgtgttttaggtacatatctgtgattgcttacttagtcattttattctttccgaaaccatgtttttactaacaaacgcaacaactattttgataaatgaatggcggtgccatctttagcctgcaaggttcgagttggtacacattacatccgatcaaaatgttttatgaacagcactatttttaccaccagtcgccgtctttatggcccgtggttggggttccgaatgtatccttgatatcattttgaccattcttttcttcttcccaggtatgttgtatgctttgtgggttgtcctacaaaactaaataaattaagtgcgtgcgatattcatcgttaactgtttcatcttaatctatttacaactctaatttgaactaattgtgtttcacagttcgatacattttattatattccctctcccattcttatcttttttttttcccttacaactttgatctttaacaaagcgtcctggtgcatcctttactgattattcaatattttaggaagagtgtcgacttatcccatttaacagctttattgacatttatttcactcaatgatgctgtaaattagtttaaaaccaaaaacctattataattaaaactaaaaaaagaagaaatagtcttgatgaaaaagcacaaacagagaccccatttatctagttttctagactatttatggcttgagttttattccctattggaaatgactcctgtctatcgtttgtaacagtttatatttcaatattattaaacattaattctttgctctaatacaaaaatcagtagtaatgatgtttaagttacacattatacttattgagtatgtatatatatacaggtcattaaagattcatcatatcaagcacacttccagccttagtttgtatttttttccaattcaatatgatttattgtttagccaccacaaatcgcatccgtggacaaggataagaaatcaagtctaatgagcgggattcaaaagctatcaaaattatagttgtggggacaacaattcaatgactgatgattgaatgaaagcaacaccagcagcaaacaaagcagtatggactaacactgggaaagctggagtttgcttgaattgatcgaattttgattcagaagctggagcagaaggagctggggcacctggaataccaaacattttttagtattgtagaactggtaagaatcggtagtgtctggcaaaaacaacagtaatcaaacaaacggtactagattgttatataaaggttttggacaatgatcattgtatgcagctaaacattatttcaatctcaaattttctgtttgacgattatcaacttttcatgaggaaatatagctggattggttccgggtaaatgttacccggaacggaatctttatcctgaacggttatgcagttcagtgtaacactgtgtgccgcaggcaaataaggttgcctctaccataagggaacataaattaatgtaatgtttattccgaacttacataaatatagatgttctattcagtagctttataaactagatttttgaataatgtgtatactattgatttttcatttattgttgagttgttagtatttgccattatttgacatttctatgtagtgtaataagaccagcttttttgtatgcgatttctgtaaatatttaaagaatgggatagcgtcctgaaagaaatagaaaggaaggttttataactcacctcgatggaacagtttatgtttcccagaaggaattccttttactctcccattaaagcagtttttccccaggccattcctggcaactctgtatgtgtataacgagaaatcatagcaagatagcatgaccaccgggatgagaaatagccatgctattgttctgcagaatgtctgaaagatcttccagaatatgtatatcaacgtcttgaacaaatctatcattgtcagtagatgctcatccatgatgatacagcgtttggagtattggatccccttcaagatgtggtgcgacccctgtgacttataattcttggccttttgctttttatcaatgtttagatcagatgatgaaagtggtaaaatttctttattggtgaagggagtcttttgccctttaaaatcttgaatttttcaatattcctgcaaaacgtgtataaccaaggtgacttctcttgccatgtgtaaaaacgagaaaaaactacaacaaaaacagtaggtaaggatttactgataaactcatcgagggcgaatggaatcttaagcaggctcttttctggtgtatttaattgttcttcataactaatttatcaaggaataaaaatacaattagttttatatctgaaagaatataatttatatattggaacatgcacatatggggaagagggcagcttgtacggcttctgcttgattcaagtttagtatttataaccaatcatggaatctcgagagaacaatgaaaccgctcggacaggagaaacttgaactacttacagatgggtaataattatagtctttgcagtaaaagaaagaaaaagcattgtaaacgtaaagtttccatgtgtgcagcagtatcagaatagtgttgaaaaatgtggtgctaacaaataaaaggggacaaaataactgtctgatgatctatcgagtgtggtgaattgattaaaagaaaaacggttttagtattttttttttttggtttttgtgtaatgattgtgtgtgtgtgtgtattgaaatggataagagtgttctatctgtatgtttcttttacatatcattggataccaataacggacaattcaagggtccatacccttctaatgtgtattttgacaggtactttcagtttttggattttgctattatctgggaagatggttaaagtgtcattttcaaagattgcagggaagtcaacttccaaatcaacgagctcttgaccccaccaacactttcttgcaggtttcttccaaaacaataatagttttgtgttgatgtctggtttcgggaccaattcgtacaaggttggagattcatttgctcgttgtcttgatgcagatctgtttcgtgatctggaacgagagcgaacattttcactgaatacagacaatctcgatttacgtttaacatcagtccgtgagggagttggtgttaacttcatgttagaacttgtgtcatttgtcattgtggacgcaatacttttttgatcatcgtcgtactttgccttagcgactgcgactgcatctctgaattcttgagttgtctcattggcaagtctacaaagagacaacgaacttatgacagtcttatccatctcttgacttctgttaccccacacagattcagttttaaaccctgatgaacatagcatatccatcaaatgttgttcagctgaccccaacttcacagtacctgtactggacttggtcccatcaacttgattcgattttgttggtttcttggccctattcgaggacttcaaccccaagaatacagatgtttgcttcaacaaatggctgccagcagccagtttgatttgcaccatcaagttatgcaagagttcctctttctccatatcagatgatccttctggatattctacggagacttgtggcacacaatagtaatccaaatcttctcttaatacgataataccaggtttttcatgcaagatctctgattcctgtgaactgcttgaattattcgaagaaccaaaattgaaaaagttattcccaccgcttgaactaccattggtgcctttacgattaaagatttcattgactgggaaatttaaataatctgtgtgtgcttgattgtacacgtccataatgtattcaaaacattccgtagaaaagttaggtatgtaaacttcatcatctggggtcaaattagtaatgatttgaccatccctatccatgaatacaccactggggaaaaggcaaagcaacaacgattctggcaaagacatcaattgagtgcgtgtgatgtaataatgcttctcctgaatattcaaatggataagtgtatcctcctcattatactgttcgtaatcaatatatgacccatcttgtccaagcagtgcaccagaagcacccccaccatctggagtaacttgcgttataatcgactgcgtttgaggctggttctgactcattgtccttctctatcaaaaattaaaaaaaaatagtgtccttaataatcgttccagtaaacaatatagcttgcaaacagaataacaattcacaaagatgaatcaacttgtaacttacagtcaatctaagatcagtaaatgaatcagctaacaatagaatagcccttttttccttttcttttccgtgcaagctacacaaatattataccaaaaaacaaagtgaaaagacacttgtagcttccttgcttcactccttcctttccccttagtaatactaggaacaggatagtgcgtcaaatatctcaaagcagaattactgattttcagctatttcgtttgccaagagtatccaaaagaattgaaattaaaagcgaacaataatcttgtaaagcactcatcattccaacactagaatgtacgaacatctaattatttcatagtattctcgattttaattttttttttattttttctctctttcaagttgctgctgtttcgatgagatggccaagaaactggtgaacaaagtcacggtagggtaatatacaaggcaagattgttgctgatgccgtacggcgttcgttttctgtaggcgacgagtgttcagattatggtgaaatcccacgaattaacgttgaatgcctagtttactggtataaatctgttttgagaccactttatcaaccctaacacggtttaaactctagtatttcccactgttgtcttttcgaaatgtcgcttcttgaattttagtaacagggaaaaactgaaaattttattggtctttcctatataagaggatgagatgatgtccttcataagaagtagccgagtttcctctacgtggctggaacattgaacgaacaggaataagtgaagggtaggtgccacacatattcttgtctctgaatacgttcagttgtgatggttcaattacatcttgatttgtgtgtttttttatcttttgaaggatcaaaagaatcattactgaatgtggattcatgtaaaatgtcttacctaactaaacacaggtatcccctcgagatgatgagatatatcattattaaccttatctacattatctgaaagtttaaatttcaattgaagataaacatgtacaacaatagctgaatttttttaaaatactcgatgtggtgacaactgtgttctggaagtagtaaatatacgtcttgttgcttgaggaaataatatttaagtagtggtcagttgtacaaacacaacctgcgattaaatatccaaatcagaatctgtgataatatcttgatcttctaacgtgattggcccttctgtgttcttattgcttgcagttggagttacaagctttacatcggatttttcttcggttgaggcagttttgtccgtgcttgtgtttaatttagaagtgggtgtggatcttgttggagattcactgtgcggtgccaaggttttcaaaggagaacggttattcttaccccttacttgttctggagtgtctatgtatgttgtctctgctacgactttcttggcccttgatggtaattggggtgggatatcgtcatcagatccaaaatctagatcatcgttgtgcaatgagatcccagcattttgtaatttcgtttggccatcgacgttgtcattgccatcacggtaacgatctccgaaggagttaaacctcgactgagaatattttggacgggattcggaataatttggatcgtcatccaccagattcttggtgatgccactgaaccatgtactgatctttttaccagtttcctggatattacggttcaaattttcacgaatctggggtaactccttatcgacgaaattactgaacacatcgtcttcaccgtcatcttcgaaattgtcatagccgtcagaatcacgtcttccctttggtggaattgcacctgctccgtacctcctctcgtaatcacgttcacgttgtctgattctacgctcgcgtgcggttctctccgaagcgctattgccatgtttgttgaatttcttatccaattgacgagccaattcttcgtcctgctctaactgcgtttttggctcacgtcttacaccacgagttggcgcttgcaccggtctagttggtaatggagcctctttttcaaagtcagggtccgatatgaataaaagagcgttgaaagcaggatccaactggccctgagaagcaattaacactgccttcacatatttctcctcaatgtttgggaacgcttccttcaattgttttaacataggattttccttttcactctgttcttctggagaaaccgattttcttacaggcaagggaggtgctgaatcgtcctcgtcctcctgaccgtgatcttgcccttcctcctgtttttcagcttttttcacgttctctgtttcggtttcagtgtctgctggaacttctgcttctacatttgaagccttagttgccgcttcttcaactgtttccttgacatcttcgatcttcttgtcttcattagaatcaacgtcaattgcgacgtcttcaactttgtcactcatggttatattagatctttctaatcaaaaagaatttgcacctgtaatttatcttcttctaatatcctggttggttctgtaattgaatattggcgagattctgcacggatatgttctaataggggttctggttttgcagtcctaaagaatctatatatattcttcctataattcctatttctttcccacatcatcctgtccattcggttatccgggtaagggccttattttttttcactttttcatctcatcacgtcaaagttgaagaaaatagtttggactatataaagaggaagactttaaagaggtgcttgtaatctctcttaatactatatcactctgtcattttacctttatagatcttgatatatttgtttttttttcctaactcctcggaatcttattattctctgtttagataagaacttggcgatcaggggtccttctaacctgatacatcgtcgagcgtggacaacagagagaaattagatgccgttggttaaaaaaaactttctggcatatagtttaacatagggctgaattcgtgccggcttgctggttcgtatgaactggatgttttgcatccaggctcttaagactcgaaaattttgggatgggtttctaagatcgctctatgtttcacgcacattttcacttaagcctatttttttaccgtagatcactcataaacgaattgtaaggcgttacttaataaatacatatagtgtggacatgtcatgtatcatgccttgttcttcatgtttcttaacttgtccataacttgggctctggtccaacaaccttgagaatctccgacttgtcttctaacaattggatcatcaagtctcataaagggattgaatgatagttcatcggcaatggtaaagtgaccagtggtgacttcgtgttccttggtaaaagattccaatttattgaaatggtcgttatcgcttttcttcaagtatatgtaattgcggatgaaacttacgtttcctgcagtatactcatgacctggatatactttcacattcttccaattggaagtatctcctgtattccctagtagtctgaagttcaatgcatcgtccatttcttcagcagttccttcgaaaaacctcccacatccaccagtgaacaaagtgtcaccggtgaagattgcttgttctttggtttcagggtcacgcacgtagtaacaagtggaatcttgggtatggcaaggtgttctaatacacaagattttcaagttccccaaggtgtattcatgtaagttatctgggatatcattcgcaattggagaacgttgagaaccggcaatgactcgagatatattattgcccttttcattcaaggctgcaagtgttgacacattgccaccagcatgatcatagtgatgatgagtgtttacaagagcttcaatgctttttgcttcatcactgccaagatcattcatcacttccaatgtctcagcaggatcgatcaaccaactctttttcttatcctgggtgctcaataagtatgaataattgaccccaccagtgagccacctcattttgatagccttgacatgcatttttcttatactttgctttatcatttgactctcctatagcatgatatttaataatgcaatgtgtgtaatggtgatatctagtttgctaatctgtattatgtacatttttccttaatttcggtatattgtgttttttgctccatcaataaaactatgagacgcgccagcttaaaagaaggttcaaacattgaaactccgtgagtatatacgttttgataccataatacatttataaatgggttcaagtatttatttttgattcaattaattgcaccaattcgtcaccaaatttttgtagtatatgctcatgcggctcaataaggttatgaattaatgacacttcttttctaatttcatcaatgttatctatctgttcctcatttactaaggatattctgagttgccgtagacttgaaagtatatcttgtggtttattcaagtttgatttcaattgattcgatggtataattcctcttttcttggtagttagtggactttccttcttcaaaggggaagaagcgggagttggatgttgaagtctcactggtgagaaaggtttggggttacgaacaggtgtggaaggcgctgacactatagtattagtgtttttgctgctatagctacttgataaatccaaaagtttaccgcttatctcgtccgcttcttcttctggtcttatttcccatgaaaataagcatccattccctgtaacagtgacaaatttattggcaacggttgtcattccaactaccggatctgcgtgagcatagtattggttaagacattttcctgtagtgtaactaaaacatcttatcgttttatccaatgaagaagaacataaaatctggtcactgtcggcattaacgtaaaaatggttaactaaaatcccatccccttggtcatccaacaatcttaataatctaggagtactgttcgaggttttatcaaatatttgcatggttttgtcggagcgtgacacaatgatatctgagtttgtcaattgtaatctcaatggagaattctttacggaaaggatggtttcttttgaaacgtttaaggtattgtcgacaatatctatccgatagcaagatacagtcctatcactcgaaattgtatataacttattgtcgcacatctcaagctgtataatattccccttattgtctttaactgtttcgcaaatattccattccccagctcgtagttctatgaagttcattgttctgtctctgctgatagtgattacaattttgaaagcatctttctcatatatttggataccgttaatggcagcgctgtgaactttgctctgatattcgcatacgttatctttgtatacagataacttccctgtggaatcaccaacaacaaaatagttttcattcacactgaaatccagagaagttatttcctcgtcagaagaaaggtctgatatatcaagttcgtacttggaaagtttggtgccatcaaatagcttgatgtctcctttcttgctacaaagaacagccaaatcattgttaatttttttgaacacttttatatcgtttagagatggatttgaaataggcttaattgtctcatttatgattgatatttcacccttagatgtacaaaacaatacagttttgttcgttaccagtttcatcatgagaattttatgtgtatcacgaactgaagcttctgtatcaacaaatttttgatcgaataaattgttctttattggacttgcacccctaatagaggagctgccacttcctggtctcaatctttcttgatggttcaaaacatgtgttaagggtatactatctacatattcatcatacgagaaccaaagcttgtcattgtcccaatctactagaatattgtcgtattgcttatcaccttctagttcgtaaagacttataagcgatccattctgatatagtacaacttgacgagaatcggttaaaaacaatagttgatcgtcacgtagccactcggagtcaatgaatgttgattcaatcaaagtaccaagcacaatgttcttgcccttgatagccgttcttgttctaggaatcgtcagcttattgtttgcagtattattggtgttttcaaacttccatactttgatttgcctgacaccatatgtaacaagagcagaatccttataccaatttagtcctagcacaattgtagaatttttattgctggccactaatcttatactattggtagataacttccatatgtgcaagaaaccgtcattaatcaatccaagactggtaaagatagtgctatcatcgggatgaaattgcaattgagatataccataactatgctgatgtattacgaataccggaaaatcattagaatccggtgccattgaatagagtaaaattcttggttgatgacctgtttcacccacaatcaaaaatttcgcatcagcagagaaacataaacatgaaatatccttaattctgtccttaattttagatggagagcatcgagctggtgataaatctgaacctattgtaacagctttctctgatgcctcatccgagtcattccaggtatcacctttaatactaatactatgctcaggctttattaacccataataatccttggcaatatttgtgggtgaatgggattcctgacgaagtgatttcgaagaagcgcaaaagaatcgttgtttgattatctgctgtgtatcgaaatccaattgtgccactaccacaccgcctgatgccgcataggcaatgagatcttttgctgcagaaaagcatgtcctcgagttcgaagaagaaccaaagatccttgaaatctttaggttatccaatggctctctcattgctggttatagctacttatggctctagttggaccattattttgtgtatttgcctttatatacaaatgatctgtgatctgtgatttgtgaaatgtctaatgttttcattttagtgtttacatgaaaagaacggtcattgcgtttgcagctatattaatacagagagcaaatgacggaagagtaaagagatataaacatatggcacatgttaataccaacactagtagcgcattgaattgctttagtgctaattcaactgtgcggtgatacttccgactttacagtgaaggttttgatcacaattctttatcccaaaaaatctgtcgcatgtctctgtttgaattatgggtagctgaaaccagtaagaaagaattcaagatgaaaaaatcagagaattgggcacgtacatgatttcattaccctgtggtcattaaagtagataacagttcttaatcagcgacaggcgagtcttactgtatcttatttattctctctttaaatacatgaaacaaaaaagtcataaattatccatcaacaatattcgtctttcatctccaatcgcattataacggataaaaacaatcagaaccattgcacgcaaagaatagtggataagtggtctacacgagactcaatgtatcgaaaaaatcactagaagtaactttggaactgtttactgaacttctaccccttgccttaccccatttatatcataacttttttgatcttttacatcatctaatccagagtaatgagccgatttgccaaggcatcgctgccactactagagataacagaacttttacaaaagggtttaccaaaggagccattcaatgcaactttgcgagatttcatagagtggaacaatctaaccaatttgcggagccataattttttcactaagaaatctgcagcccaaataaatgaagttaataggttacaaccggtattatctcattgcttcgcacgttggttgcacgttgaatacaagctcaactattatccttattacgatcttaatgttgtgtgcttatacactgatctaaatgctggcattgaaaatgcaaagcatgtagtaaattatttcaagaaatttgtgaccgatgatgtatatgacagattaaactactacttggtaccactttatgataccaaaattgacgcaatgactaaaagcacaaatgatccaaagatacgaataatgaaagaaggtattctatctaaccatatgaactatcagattgaggatcctgtttttgttaccatgataaacgatgtcgtgaaatttcttccctgtgatttggttcaatacgatccccagcttgagaaatggttacaagcatatatcgaatatgatccagaaaaagggttcatgaaacaagatttccaagagatggattattggtgtcatatgacagctaatcttttgaaattagacaaagattataaagggcatgaactatacataacgactcggctagtgcatttgtttgctcaattacaccgtacgataccggagcacaaactatttattattgacaatccacagagatggtcgccaaacatagctaccataatcaagctaatgatgggatgggaaaattatccaataacacaagcaaatatttcaagtcacttatatcaaccttggactaaggagaatctccttcatagagacaattcaacttttatcaccgatttccaacaagttaagaaattgtacacagagattaccgaaggtacgaaaactttggaatcggaagacttacatgatttcgctaatgagtggatggattatggtgagagtcaagaattattggatggtgatccaagtaattcaatcaatatagcaagacaatatttacatgattcgacattggctgtaatccgaggataacgggctggcgttatatatatgtgacaggggtaagtaggggattgcaacaattaattgattagtgtactttacatcttaagtatgtaaaccactcacattcactcaaataaacgattctgaatttgttgtacacattttattgctgttgttatattggagtgtgtaatgtggtatttctataattcctcataaattggaaagaaaactaggtaataggtggtgatatccaatgagattttcccaaatggtgaaagcatgctaatccgcatatatgtctattattaaaacaatttatctttcatttagtgtctggaaagagtgcattttgaaagaaagtgagatagtccattaatatgtttattaagagcaattcaggacgttgcatacctttcaaatcaagggttacaaccggtgagaatatatttttggcgaaccctttgagcggagtggcaaggaataattcgacagtcttccttatttctttcttctgaatataccaggcaagacaccagctttctcatctgaaacagggcctttcacgtcattggtttcagtattgctctcaggaagagatgctttggattcgttatcattctctccttgatttttcttagagccagtgactggaatctcgattgatctacccatgaatgcaaagcctgggtggaataccgttagaaccacagtggccaaagacatcatcaatgcgtcaaggataatgaagtaccactcgtgagaaattaagaaaccattccaaccttgggccaactcagcgactctgtaaatacaacgaacatacacgaacaataccgctgctgtaagagccaagttgaagtaatggaaagtccaacgatgaccttctctgaccattgcgtatttttctctgaacaagtgatcaacgtcgaaccttgacactttaaataattgaaaccacttccaatgcgatatacccaaatactcagctcttgtcttgatgtaaacttcgtacaagaaatggaaccataggcccaagaagatcgtcatcgatgccacctgcacggcaagaccagcaacgaaaatgttgtcaccggtatcggtacttttcagttctctaacggcagaagcagatgtaccaccaccgacagcctggatgacaagcgaaacaatatcacaaacgataaaaatgtacgaataagacatcggagttggtaacaaagcgtaacgctggccataaatttcgatcaattttgccaattggtaatagataccggccatagtgaaaactggagcaatggtcaaacaaacaatctgcataatgaaataatctgcctgcggaccaccatcttgatgagacaaagccctaccaacgtaaccgattgtttcaaggacgcatgcacatataaagcacacaaaaaaccaccattgcttggtaaatgcaccgataaaagcatgacaaaacactaaaacaccgaaaatagctgccatggtacaattaaaccttaaattaggcattgtaccagaataatagttaacatcatcaggattgatcgttgccgtgggcaacgctgaaacaacagcagtacctatgctggctatagtacttgacattgaaagtaaaaaaagtgattatcaattagctaatatctaattcctttcgataatgtgcccggctaaagtctaactgtaaatatataaacagaatgatatttgaagccaaataagagtctcactcgatagttggacttatctattgacagatagttgcgagagatcaaattttaccaacatctttactaataaaacttcggtgacacagctttcatgatatcatgtatattcgatgcttatatatatatatatttgaatcccaaatcaaaattcgcagaacaaagaaaaaggtataaaagaaatgagaatagaaacagttccatacggcctgcgaattgatgaatcaggatttcctacgcatctgtaagaaagaattcccctatgactgatgatgcgatgcacatttactaattcagcaccgcccccaattgtagcaagccattcatcctgttaaaaataaatactttcccaatacctacttgaataccgcgagtatgcggatatacattgcatctcatctacattcccggaaagtaagatacaagatattttaactaatgctctgctgccgtaagttgcaccattaagacgttaaaggaccatggcattgacattgtcaatgccactcaccattgacctactcttccaaacctaaccctgatgatagttttgagaataacagcatgctgtacattttctctttatctttcttccgatgagttgtatataccgtaaatacagcgaatgcacctgactgtaagattttcctttaatatttgcctagcattcctcgagtcattgcagctatttctgtggacaggggcgggggcgggggtcctcgtcatattattagctttcctaaggggaaaaaaaccagtttttcacgctatgcacttgttgttacccggacatcatgtaccgataggatcctatttttattctcggtgactcgggcttagctccaagcattggacaattaagaccggaatccagtacttcgctacccgctgatattaacacagtgcggtcacgtggatacgatttttgatgacgatgaagataacataacatagcataaaatttatatgcgatgcctgtgcaatgtgcctccttaattttgaaatttccagcccttattccttctgtgggctattatatccttgttagatcttggcaagggaacaaaataagtaatcgaacttatttgatccttgaacggcttatattagattttccaatcttttttttttctttgattttcgaactgtttttctatttactgtcggaattgcattttagaagttcaccttgatggatcacagcgttctggataaagcacccctgtgttcttttagctgtcctttattaatcatctcttggtctgtatatatactagatatatatacttggtacttctggtttttatcagctgcagaagtttaatcttctttgtcaactgtagagttgaacgtgaccgaatattcccctgatttatagttttggaggaataaggccaatcatggcagctaagatacctcatgttgattcgaattaccgtaatgactataccggtaagaagtatacgtttagatcgtggctatacgatgtagcggtgttcatcttcgatatagtattcacgatttttttcagagagattcaagtccgtggttcgtaccatgtccccacaaaaaataccccaacgatccttgtgtgtgcaccacatgcgaatcaattcattgacgcttgtttagtcatgtcgcagactaggaagattactggctctcgttcaaaacagacgtgctttgttaccgctgaaggttcgatgaagaacaatagatttgtgggattgtttggatcttggaccggtgcaattccggttcctagagttcaggataatctcgcacctgtggcctcacacttcaagctttatattccaaactatgattctgatccgactttggtcaaattgatgtcttttgaaggaccagtacgagctacttctcatttcactccgaaatcgttgatcggattgccaggttacattggtagcgctcaaattgaaacagttgtcgatgatgaaacgataaggttgaggaaaccgttccctgataacaaccgggtaaaaaactgtgtatcgaaaccaacatcgttcttatacgctgaaaagatcgataactcgaaagtgttcgaaaatgtgtttaaccatttgcacacaagaggctgtgtcggtatcttccccgaaggcggttctcacgatagaccttcgcttctaccattaaaggctggtgtcgctattatggcactaggtgctgcagcagctgatccaacgatggaagttcatgttgttccatgcggattgcattacttccacagaaacaaattcagatctagagctactttggaatacactgagccaattattgtcactggtgagatgggagctgcgtatttgaaggatcccagaggtgccacctcgagtcttctaaagagaattgaagaagccctttattccgtgacaatgaatgctgatgattacgatacccttatggctgtgcaaacggcgaggagattataccaactttcgaaaagatccactacgggttcaacgttaccattaagtgacaatgactctaatcatagaattccgttaccattggtagttgagatgaatagaagattgcttgttggttattcgaaatttaaaggtgaacctagaattcaacatctaaagaaggctattcaagattataacaggatgcttttcaagatgggtttgaaagaccaccaaatcatgaacttacacccaaaggatgaaaaatggattgtccttgtaacattgttaatcagatgcgtgcaagtttactttattgtcctaatgtctttccctggtgtcattttgttcagccccatcttcattacttgtaagtacttctccagaaagaaggcccttgaggggttgaaaaaatccaccgttaagattaaaggacaagatttgattgccacttggaagatcgtcgttgctatatcaatggctccaacactatacacaatatattcattgatcatggtttatatcacaaggaaacacccatctctctacaactggttaattgttccacattttatcttcaagagcaaactcttgtactttatctattgctatgtggtgttgattctcgccacgtatgtcagttttgttaccggagaaattgggatggatatagtcaaatcattcccacctttgttagtgtctttgctttatcccggtcatacttgtgagaaattaaagaaaaccaggatgaagcttagtcaagatattactgaggtgtgtaatgatttaggtccaatggttttcccagatttgaaggagaaaagagagctacggaaagaattcttcgaaaatgatggctcagaaatagaggataaagattcagatcgtgaagctgatgaagaaccaaacactagaagtcgttcatcttcggtctattcaaatgattctagtgtatctaatgcactttccaaaatcaattcaaggggttctttagttgatattcctatcttttctgatggtcctcattgttatcaaacagaagatcaagattttcctacaagctctgtcgacattgaaccgcttcaaccacattcaaaaattgcgtcactgatcaggcaacgcagagaaaaggaggaagattgatagagaattccggtcttcattattatattccacttcacatatagatatcttcaattaactaatgcataacgtttaaattagataacttaccacgttacatgaaagagtaaagattctaatacaattacttgaccaatgttgtatgcagagatcaatcctcccctgcaggcatctcatctttcaaaactttgtttagttttaccctaagttcagtctgtgtatttcctcttaacacatcagatacaaaatacacctcacagtccagttgtaccatttccagggcaccttttagaacaccacataatatattagaataccatagctccttcgacgcatccataggtaattcaacgaagtcggatagagggttttcatcgaatattagagaaaaagagttctttgtattggaccagttggtgacatgtggagttatatttagaaatattttgaatgcacacttactgatcacctcacttgtggtgacaaagttgtcgcatcttggaatggcagtacgagctaggaagtcttcgataagccttattccaatattgtagcccattgaaaacaattgatcgtttactttcttgaaatcacgctggtaatcttgacatagttgagaaactatggatccatacgttagagtaaatagctccgcgttgatcttaacagtacgattcttccatacggtttcaccaatttgttttatggtttttgaggatgccagacttgtcgtattagcagcagaggccgttttcgaagtgcccgtggtagtgttcatgattaatccggtttcttgattggaatgtgtgttttcctcactataagatagcccttccctgtgaaagcacccttcaattatactttaatcgattatgttcaatattataatgaatgttctttgatttcaactttttttatttcattgtaatactaaaagttgcagaatgtgatgagtacagtccttagacatacaaatatggctgaaagcatacagaatataggatgccagtgccgtaacacaaatcatagggtgttcatgttcacatatcgttatattataataatttaattcttgtttttctataaaactaaatatttccactatacattgaggggaaacttaatctttgttcaacaaattgtccaggataacttggtatttaccatgagttgccttgttagccttcagtaaaatttcctctgctctcttgtaagagtcttcctgttctttcgattcgtaatcgtaaaggttccctaaatcaatgatcgcttcagcgacgtcgacccaggtttgaggttcatcttccactttcgcttcttgcaagtacctgatagcatattcaaccaatggaatggctttcgattgtgcatttttagccttctctagagcctccttatcagtttgctcttcatcgtcgctatcatacatcaattcagcaaaagtttttgatggttcctcggccagttttaagtaaagttggccaagcgtacgcgcgatactcttgaacaaaactactgttggatgatctttatcgatgtcagggccgaccttgttgcaaaatgatgaagatatgtcattgaacaaattcaacaaattttctttcaaccactcgtagttctgattcatgtttttcttgattttcgttagtggatggttttcgtgcaatacaacctctactaattcctcaccttcatcatcgctatccaacccatcttccaattcctctttatcctcgaatgtctcaatgatgtctagcaagtcatagaaacttaacagcacatcatatgccaattgatgctgatttgacgaaagagtgtacgaactctttgccgattctaataaatcataaagcttgtacttctcgtcgttttgatccaatggagagagttgagatatatactgtaaggggattctttgtaaaataattttagtttgcgttaaagataacaaaggagtttccgggtatttctcagcgccaagtctatacctttccaaagcagcatcgaaaaattcattcattctctcgtacttcttctcttcgtcatcggtttcttccggaaggaaaactgttagctctgccaaagcctgcgcataaatagagtgaaacaaatcgctcagttttatagtgctatcattgtcctgaagacgcaataatctgtcacattcgtgcactacaccatttaacaatagctgattatctttatccttcaggaaagtttcccacaaaccctttagttggactaactcatcatcggcatcctcgttttcatccaatgcaatttcaatctggtttgctgcagatggtgctggtaccgttccctcagaagattgctcttctggcacagcaactttttgcttcttttgtttcttacttttgcctaatcccaaagctcttttagccatctttgcagttcttatctttgtttttagttgttctcgtagagcctttatcacgtgagatcttgtggtgaattgagtttagaaacaggaccgacttatacatcgcacttgccagcaatttatataactgcatgtatctctaatctcatctcgtaaaatgtgtcgttaaataaaattgaaccatgccacgctcaaatctgatgcttactggcacggcctgtcagctgattccatactgtattcgtgaaaggcgatttgaaaaagaaaatgtgaatctgagatctgaagtcacgtgtatgtatttatacacgtgacttggtgaaatgttgtttttttttttaattatcaagctccacatcacagttgtggcttcaagtcccttccgatgagttgcaatgatgcattcaggccatgtagtgtgagcaatttgaattatgtaggtttgaatagagtaaaacagtgtaaactaaggcgtcaatcactcattttaatactttcatgattcgagatcagttatagtatatatatatgtgtatgtatgtatcaaggttacagtatcagttaaggtaagtactagtttggaattcttgtaacttatttatcgatatgtccggtaaactaaatcatagaggcatacttctaccaatgtctgttcaaaatgaatccaggtttattgagaaacggtttacaccgttgattacaagtttgaaatcagtaggagagcagtatttgcttattggtacacactcaataaatgtaactcaatcaagaattagcagtatacttgactctggtgcatcatgcgtggtgattcatagtggtaagaattcagacctgaagcaattatctcagaggttttacggtaataatgatgtggttcttttagatagagagttccagttatccgatttgacaactctcggcagagttgctgtaggtaagatcgttgacagagtctttgtgaacttggactcaaaacagtctctgttgatcagagatatctttgagcaatgtcagaagttaagaataccgattaatactcatcagagaccagaatactctacgttctcgatatgttctacatacaatgatccaggacaaagcgggttgcagatcgctatcaccactaatgggcaaggttgtttactggcgaataggatcaaaagagaaattgtatcaaggctaccgcaaaacatttccaaagttgtaagtaatatgggacatctcagagaaagaataatatacgaggatcataatcaaattattcattcccatttcttaaacaaagatttacaagatttggggttcggaatcgacgaagatgtttgggagtctcataagttgaataaacttgtgtatgagttcaacgtaagtgagaaacagttgaaaatgaagcgtagtagatggttatcgcagattatggaatattatcctttgcaatcgttggctgaactttctgtggatcagttggccgatcagtaccacaaaatttctcaagaagataactctaaggagaatgcttccaaaaaacaacgtaacactccagataagaaggctagtaacgtaaatgatgccgatgtccaagtttcaaccactgcaagcagtatattggatgttcccaagaaaggatcgatttcactagtgggcagtggtccaggatctgtatccatgctcacgattggtgccttacatgagatcaaaactgctgatctcattcttgcagataagttggttcctgaaaaggtactacagttaataccacaaggtactgagaccttcatcgccagaaaattccctggtaatgcggaaagggcacaagaagaacttttagagaagggttttgacggtttgcagaaaggattgaaagtagtaagattaaaacagggagacccatatatatttggacgtggtggcgaagagttcctcttcttccaggacaaagggtacactccgttggtgcttccaggcttatcttccgctcttgcagctacagtcgtgtcaaatattcctgcaactcaacgtgacgtagcagatcaagtcttaatctgcacaggtacaggcagaaagggtgcattaccaaacatccccgaatatgtggaaacgaggactaccgttttcctcatgtcattgcacagggcacaagtgttgatcgatgcattgttggagaaaggatgggatgaaaacgttcctgcggccatagtagaaagagcctcttgtccagatcaacgtatcacaagaactttactgaaaaacataccacaaacagtagaggaaattggatcaagacccccaggtctattagttgtaggaaatgccatcaatgttctaaccgatccagaactattgaagtacgattcttcaaacacataccatattgaagaaggatacgaacacgttggattcgaggacaatgtacaaaaactattaaatatttaacattatttattcatagacagtcataacataatgcatatcataatatctattagtatcaagatggggttcctcaactcagtatgcgcttgatatttctgactgcactaaaatattgttgtgaaatactggaaatctggtataaaagaaaataagaaccttaaaaccagcgcaaaatcaattcattaaaagcacaagacctgaactaaaattgagctgaaccctgcatcaaagccgaccgtaaagcaaaaaaaaatgccgtcattcgctttcaaaagagcattgacaagagccttccacacagacattgcgtttgcatttgacatagatggtgttttactgagatccaagactccaattccaggtgcatctgaggctttaaaactgctaaacaaagaaaagatcccatatatactgctgaccaacggaggtggtgtgcttgagaacaaacgtaccgaacttatttcagacgcattggatgttgaaatctcaccgttacaaatcgtgcagagtcatactccatttaaggctctagttaataaacacaagaaagtactatgctctggggttgacactgtcagagacgtcgctgagaaatacggattcgagaaggtgattcaaccaattgacgtcctagcatataacaaggatatttctccttttacagctgtcactgaagaacatttgaaaagagtagccaaaagacacgaatcgttgttggaaactccattcgatgcgatcatggttttcagcgatccaaaagattgggccactgatatccaagttatatctgatttattgaacagtgatcgtgggtaccttggtacactgaggaaaggtagtagtgaagaaccatcaattccaatatatttctctaacgatgatttactatgggccaatcattatcatttgaacagatttggacaaggtgcatttaggctcatcatcaatagtttatattcaaagctgaatgatgagaaaaaattaaacgatactgtcattggtaaaccatctaagctgacctacgatttcgctaacaacgtgttggtagattggagacagaaattaatcgatgggaagacagattccacagaacagttattaccgcgattgggtgttccaccaaaaaattcgccatttgagaaagtgtacatggtgggcgacaatccagcaagtgatatcatcggagcgttcaattacggatgggagagctgcttagtaagaaccggtgtttttgctgatggtgacaaattaccttgcaaaccaacaatgattgtcgataacgtattggaagccgttaccaaatccatggaaaggcattgaacgcaacttattgagttagagcccatgaactatatggaatataattagacctagtatttgttgagacaatgaattaaaatatacatagtttgtaatagaaaacagagttcatatcatttgatgtaatgatgcaagtaagagtaaaaagtcacgatatatatatattagggtagaagccaatgaggctaaggcaaaagaaaaacgatgacaggtatgttccgcaagttgtcaattgaccagcacatcaaagtaaaatcatcagaatcctgtccatgatgaaactattgatgtgttctctcttgtactaaaaattatgatatactggaaccatttccgtttgataattagagtgcattttatgaaaagttcagtcggcttaactggtaagataaagtctatttgtagagccctgcttttagtttagagtccgtttttagaagtaaattctgacccacattagatgtgaatctttggtacaataggttgctccttgtgtaacttatcagcgtttctttgatgcatttgatccttacaggatttcaaaccctgacattggtgattctccaaaagtctatgtttcgaacagaaatgaccatcacagaagttgcaatcgccaataaacttcacagcactgctgctacacttctcaaagcaacacttatccttctttttcttcttcttaacatccttttttgccactctggattgtgtcgtcactttaatgccgccatttgccacaccactttcgtctgcatgttctgctctcatttcgctgttttcaccagtaaagttattgtttatcgtttctggcatctttagattgtatatatccttagtagacccaaccaaacagttgattacggaggttttggtcttattgcctctgttatgactaaaatacctttatcaaaaaagacgacctgtagcctttatctatgttgaaactgtctatttcctttttccttttttccttttctttatataatacctgaatgccatagtaatcacggaaaaaaagcatttcgagacttgctcattatagcaaatgggcaagtctcatgtgtcatcttgacctaggagtgcatcagtactgcacaagggaatattctgtgatctaaagatgcgaaatggttgaatttggggtatgtgggttgtatatacaatacagactatgtagtgtttttagttctccattttaatgtttcatgagagttcggctccttcacaaatcgtcggatatactgttcaagttaatagattggcctggtttgaatgcggggaggcctaggtatggacatccggaacatctgaaggcatctcctagagcacatgaaccacaacctcctacttttttaccctctatagtgaaatcgatttctgtcaattcttcttccgagaatttaatgacttgttgttgcttagctcttcttgactctatttcttgttcctccatctctttaagtccacatgaacaatccttacaggcttttcttcttctttgcttggatttaccgcactggatcattgtgattgtatcctcttcggtttctgctattaaatcgtcttcatcaattgagtctccggtctctggatcatcgaaatcatcaaagaacttggttttagagttgtttgcagaatcgtcactttcgagatcatcgtcatcgtcctctagatccgagtcagtaagcttgattgcggatacctttttagtcagtttcttaaatgtaggtaatttcttcaaactaaccgcaagtcctgccgagggtgacgatccaataggttgtgttttattcagcttcttgaaacttggtaaagcaacaggtgcactggctccattcttcatgtttccctttaatgatatgctcactggagcctttttctctctagattctttcacccaatagtactctgacccattattactaacaatttcaaacccattaattaaagcatccactttcaaagtatcacttaatccatatagtctacctgaaggtttcaacgtcttgtgaagcacaggtattagttttggtggaaactgaatggcttctggcttttcaggagtcacatagtatattacatcgtacttctcatcatctggagaaatagtaccatcatttagtttgttaatcaaatactgagcaactatagtagtctcagacaagattgaacccttctcaatagtttccaatagctccggctgttgcgttacagctggatggatcaaaaccaacgagtctctactcacagtcatactttctttgaccttcttttatctctgcttccagttagtataaggggaaatgagcaacagtgaacagctcaataataaaccggtattaaacagtactgtgaaataagactaagtagtgtattctcttgatattagttcagcacccatataaagaaaatcttaacttgtcctgctgtccgctctttatcatgaacataagaaaacagttactcatctttccaacttcttactcatagaaagatgattaagttcttccaaatatattccagatgtcaagcttcggatttcctgagtaatcaagagaaaaaaaaaaaaaagaaagtatatcatggcacgtgacttacgggccaaaagttagattagtaagacaactgctgggttgccggaaccggttaatacgatggacggtaccggaaggacctgtatgtctggtattagaatgttacaatggggtgatagttatgtatgcatttatgtatagcttttgtgtaccgttgtgattagaatcggaaggttggtgttgtgatgactatggcgggttatgcgtcggtggatggtggcgatgttacggtttcgtgtagactcttgacttcatcgatttcattcacttcatcatcttcctcttcgtcatcgtcgtcgtcgtcgtcatcgtcatcgtcatcatcatcatcatcatcatcgtcatcgtcgtcatcatcatcatccaagttcttcttatcagatcgatcttcttcatcgtcgtcatcttcgtcttcatcttcttcgccttcctcttggttttcgtcttctggataccctcctaacttcataaccaccttgtctacgatctcattaccatccatcattccaccaagtcctatatcaccgtatatcccaacaactttctctgatggtttgaatacggtaatccaaggcatttcttctttaatcatgttaaggtgtctcttcgtgatggaagagttataactgttgcttaccatggatggtgccaaaaatattgggaacagtggattccaagctcttattacacttgtcaacaaattatcacataggcccaaggcaatcttagataaggtgttagcagtaagaggagccactacgagaatgtctgcccaacgacggagttcaatgtgtaatacgggatccgttctttgcttccacgcgtcccactcatcttgatccaaccacacttggatatgtggaggaagttcaatcttggccgctgtggatatcgtattaccatcagttgactttgtttcttgccctatgggtacggtgttggatgggatatcggtagatgctaccgtaggttcttgagacaaaggagatgatactgatggagtttgagcaacctgcgtttgaccttgtgtgtgggactggcctgaaatcgaccccttcttcctgttaagtgttctatttgcgaagaattgagcagcagcttgtgttaaaatgacttgaatcgacaccctgtctctaccatatatttcttctaattttttaatcattgatttgatcttcaatactgataacgaaccggtagctccaaacaagatgtgtagtttcccgtcatcttgtggtaaccttggatctacgttcttggcagcttctctctttgggatatttggagccactatctgcgcgatttccacaggtggttctgaggctattacctgttcatcttcaggaattgttgtttcatttagtttgaaagtgggagctgcgttggtttgtgatccatttggcattggtgatatactgttggatctggatcttgatttgaaacttggagaatgtaattcatcattcacgacaaaatgaggatgttgttcttcttgaggtttagatgtctctgcttgagaaccaaggttgataccttcgactccttcttgaatagtggcttccagtggtgtcttaggctcggtctcggcaccaccggcggtttgttccaccgcagaagtcttgtgtacgttggcaggagctttcctaacccttaaatcctcctgtgatttactcaagggggactgaatcctttgttcaattgcagttcctgcagttggttgttttacagaagtggttaattccacaggcggaggcgaccctgctttatccgaaacaactggggacgctaccttgcttggattgttcaaactgttaagtaaggctgacgcttgttctgcagcggcttgctgtttgagtacggcatgcttagcatcagtgaaagtcacagttggaactcgtttcaaaccagatgctggagtattactcacaacagcaccagaagtcccactggcattcataatagatttagtaatactaacagaaggactggccggtttattgaccggagacgtagtctgagaagcagacgatccaacagcgctacctgtcgaattgagcatctctgaatttctttgttcgccaagattcacaaatctaggggacaccaaagagggctggctctccggagagtgaggagttattggactcatttgattcccaagttgtctgaatatcgatacaaatcaaccacgaaacgattaagcagtcgctaactaattaaaattggaagaacaggtgctggtcaccgaacgcttttgaaaactattgccagaaattagaaagaaaaatctctctgtatgggaaaacaaaaactgttcccgcttgaaatgaatgtgtatttccacaacaaataaccggtatttaaattagcaccttgatagagtagcgtaatgtgtaaataaaaacaaccactggtgtctgcgaaaaccttttatctcaactgagaatattctaatatatccctttctatggttttcatggacctaatctactgtcccatttatttttttttcggtatttttccttgtgtgcttttattctgattttttgcttatgggaaaattagtttgagaagctgtcaagtgtgtattatggaatttggaattacgtgatggtaaggaaatttctaattggaggggaaaaaccgcacatgtaccgattcttaaagcttttagaataagtactgcatctagtatcgctgtttatgtagtcctaatgtagggtcagaggtgtatatacgattctgtttactgtagtgtacctcacataaccaaaaaaaaaaaaaaaaattcactgcggttcctgtaaatgagtgtgagtagaagcattaaccgtactgcaatgcttcatctgtcgaaatgggtagttggtgttgatggttgttgtccaaatttataataaaagagaattagatagctttaaaagataaagaatttagttatcgagaggttctattttgtatagggtaaatctatctctttcttgtactgttggcgaaacgtcctctaccaacacgaacattgtggtgctttaaaccatcgatggcaaacggcgagatataattttctgcagatccgccaccgatccagttgtttaggatcttttcgttgtgtcttctagtccattcttcttgtttgacagccttctcgtactccttttgatcttctcttaggagttcaacatcttgagaatgttttgaatgtacaaaacctttgttgccaaatctcttctgtgcattctttgataggggacttggtaaggaataacgattacctctgttattccattggaagttagccttcaaatgaggcgtcacttttccggtcacagaatcaacggaaaccgcacatctcaatacggtgcctgaaccaccacaagacggacagaaatgctttgccttaccatcttttggcataggtagtagttggaaacaggcatgacatcttaacatatagttacgaagcttcttgattcttaaaccggacatgaagttcatcaagtttaaatttaattgtaacgaaacgttctgcactgcaaaatcaccagtcgctagagctacttggttttgaggcagctctaatgatgatgcagtgttgttttcggatacgacgccttctccgcctgtggtatcttcgccgctgtctttgataatggcttctgttaagttatctggggtgatccattcaccatcctcatcggataggaatccttcttcttcttcgtcattttttgcttccgttgcagtttcaacttcttcttcaccaggtacatcaggggaaacttcatccactagtattggctgttcctgctcctcattagctggttcttgtgattcagttggttggtgttcggctgtagtttcttgagattttgcggcagcttctctcttttctctctgtttcttacctcctcttctagttttcttcttattcttcttcacaggcgtttcggcggtgtcagattcagcagtaggatcctgcgtttgttcaattgtttcctttggccttgtttcttccttcgtttcatgtttcaacgcttcacctggtctttttcttagtctccaatctcctttattaagttcagtctctaattcatatgccaacgcgatgatatggatatcgttagcacttagtacagaataatcaccagttaacttggcaaaatcggacactcgcttgattgatgcagccgaaggatgtttcaccttcaacgttcctaaactttgccaaatctctaagttcttcctagacttggcatctttgatttcatgcaatacagttggagcagtgtaaaatgtttccgcatagttctggtaatgggtataagattgagtgatcaatggagttgcatcgagcactaaagctttgacatgcggatgttgttcagccatagtgtattagttttatctttattagaccgaccagagcaacactattagctatagatgtgaaatgattctgttatacgatagtatagataggtacagcttaattaactgttcaacagtgaattcgtaacttgtttagcacatctcatctcatcgcatctcatcgcatcttaaggcttcatttcttttaataaaattttcatgcatgcatttcataccacgtgacttcgccatatcataacgtagttcattaacagaatttagataaacatgaggaagattgacgtggtgaaaaaagtttcgtttgtttgtcctatacctacagttagccgtgtgcttggagttgtgctggtactcttccaaaacgccattcttcctattcctgtttatttaggttcctttaggatatgatctttttgtcagaagaaccttcaaagcacgatgaaataagaatttgaaagaaaaatgattcaaaccgctaaaagaagagagtccaagaagtattatataccactgtatttatctttccacaccaggtacggatttctaccaataatcatctgttgaagtaaaatatgccagttgaaaaagatttgaaagaagcttattctctattgtacgataaaattgaagtggaaaaggcattggaattgtacgacaaagtcctcaagcaggatccaaatagtttgaatgcgaatgtgtacaaatcagtatgtcttgaaaaattatactttagatcaagttcatggcataacgaagaaaccttacaagcttcttacgatttcttaaagaaggcattagacattgcagaaagaagaggagacagatcaaaaatagggtttgtgtattttaggttttgcatacactactataattgtaagaaatactgtctagctcaagaattcatgcagaaatgtgaatcatatggattcaaagatgacactttaccaatgtggaaacataacattgatactgcaatcaggaagcatgtcaagaaggatgtgatggatgagagggcgaaggctgtgaggtctcctgagacagacaaagcttcttcagacatgtctccttcggaggcacaaaaggacctaccaacactttctcaggaggataaattaaaaatggattggtatcaaagctctagcactgttacactctcgttgttcaccaaaaatctacctaactcaaaaagtgatgttaatgtcagcatcaaaggctctcatctaagcatttcatatcctataccagataagggatcagaatttcaatattctatcatgttgagtcacaacgttgacccgactgctattcaagtttctgtattcactaagaagctagaagttacactaggcaaagctgaacagtatcaatggaagagtctagaaaggaccgatggggacgtaactccgctgattacgaaaaacatcatcaattcagactcttctgccaaagaactttcatatccttcatcatctaaaaaggccattgattggtccaagatagatattgacagcgatgaacaagattcaaagaatcaatccgcagacgcctttttccaacagatatacaagggagctgatgaagatacgagacgagctatgatgaaatcatttattgaaagcaatggaacctcattgagtacaaattgggaagaagtgtcaaagggaaaagttgagccagcattgcccgaaggtgttgaaatgaagaaattatagttaatatttcagttaatattacacgtgttattggatatatcacggatggtcaatttctatataaaagtataaacaatttctgttgaaactagtagatataatacagtgttgtcatcgggttcagtcaaaaagcactactatcccaatctatgttctcatcatttgcattgttgagtttggctaattgagattgcttccattcaatgaaattatcgtcattcaaaaagctcgagtcaccgttattagtattattggctccgttattactgcacacatttaatttgagtttaccttcaggggatttaattattgaatacactgacccaagaggttcttttattgggctacttggcaattttgtagccatatatcttgcaccatttgcatcttttacgttcatattgtttcgttcaaaactgttcaatgaacaatctcctaactttgcgagaggttggtgtgtcttttcagttgatttcaggatattcaaaaggttgctcgaaattggtgctaattgtttcggttttactatactttttcgtttttccctacaattcaaagagccgatacgagtatctagcgttggtatacgtgaaagatcttttttgaccgatatgtgaggaggtggaagaagtacatttgtttttttggtactttctattgtgatcctgcttcgaggggtgaaaaccggctttgatatcttattcttgtccacagactttacaaggcgtgtagaaccagctacacgacttgcttttggagttttaggtactactttcttgatttcgtcttgtttaacagaaggcggtttcatatttattctgcttttaggatacttgctcaataactcagcttcctgctgtatcacaacatctaaaaagtactcgccgttgagaaggaaaggctttccaaacacgtcttgaaattgaagtaatttttcttttaggtcttggacaatggttggaaaatgccttgatatacgttttcttgttctttcttcctcaagtaggatcttgtgagagtttcttgcgagaagcctcgaagagtcttttgtactttcatctaatctgattttgtctttctgtaaagaatcaaaactctcaatcaatttccagataggctgatagatatccatctttttcttaagatcctcgatctgagattcacaatactccaaaagatgctcatcatcttctaacgattgtgattctttggacatattatcaaatgaagtaaggaattcctcttgttcttccatagtaaatgacattgctttgtagtattcttttatcttctcccaagactcttgtattagtttttttatcaacttcttcttcatctcttccagcttaagtaactcatttgctaaattttctaatgaacgcattgataaatcagaattattctctatgaatttctgttgttgttgttctggaactttcaatttcgtccataaaacttggcactttctcaaaagttcagttctttccttcaatcgattttgtcgttggtattcgcatttcttcaatgacttttgtaatgattcgatagcatgccacgtaatagtcggtttagcatcttctgaaatttcaatatgtagttcatttggaagttctgaacggatatcaatgcacaaatcgtcagcaatttgtaagaggttgttcaataattccttataagtttcaagccgtctattgtattcctcctggtagttttttattaaggtttccaatgtgtggatacaattagacgtaaggttagaaaagaatgactgataaaacaccgctttttcttcttcctggaagaatttgaacaacgactgcatatctcctttacaggttcgtattctggtattgaaatcatcgcacaaagctgcagttggaagagctaggttggcaggtagaatttgatcttccatatcggggactttatccatcaaatgtcgtagtttcatgacagtggataaatgatccataaacttaggtaaataagcgttcataacaaaaactttcacattattgagcgttttcaatttgttaagtagtgaggctgatgttctttgaggacttgaacagttgtcatctataattgcttgagcagatgtctccagtacactgtttctcataaacagatcgggtatcgtatatactcctttcggatcattgatggcattaagcatacactgtaggctatgttgaccaacctgatattcttttgtaagcatatctcgttccgcattagcctcatcgaagaacttcgaaatcgaatttgatagattgtggaaaatctgtttctccttccttgatatctctatattcgagtatccaacctctcgatatatcacatcaagttcactcaataggttttgtagttgtcgggatataagattaaagttttctttgtataagctgtcatttgtctcaatattcatctgaccttgctttagaggtgatcttaaagttttcaagttaaccggtgtcaatcttaaacagtcagtagggtctggtacttccgatacaggtgttgtttgcatcttgtcatcgatgtttgtggcgctggttatgatggataaagggcattcaacagagagttgttgaaggtaattctactactctgcttttgttcggttttccagttttgatcgatgttctatgtatttacattttgaccaaattgggaaattcaaaacattgaagaatctataagcttgaactaagtgacgctgacgtcgaagcttaccataatggaagatgttggcagataggcattgtggcagaggagcttgagaggggggaagaagattaatatctgagttagatatgattattccacgttttaaaaaaaattcaaggtagtttttgtgtcaaagttcatactagggttttgactgtttttagaactatcacttggtatatgtagctggcatgtcactttgcctggcatattcaaacaaacatcttgaatatttattttacttacatgtaaagaatggccatatgaatacctgccttctgtggatcacataaggttcttttcaaagcctacagtagcatttttgtaatatcgttttgacagaataaatagacaataacaatggcatttggattgtcagaagccgatcttaagaagctgactaggacatcctgcttgaactttcgacccactttgagccccaacttccagttaaaaaccaactttatcatatctttgcgaatttggcgaatcctgcgttcgcccaatggcacaaccacatataaggacaaagtcaagagctgttgaaacggatcataaactatgatcgggtaactaccaatgtaataggcggttaagtatcaagatgatacataaggattgtttctagttgaaacatcattaaccaatctgaattattatataaggaggcattagatctgaacaaggaccatcgacacagtcatgccagatcgccaggtacatcaacatacactactagatatatagctaataaacactatggattcatcagataccaaagatcttgaaacaacaacacgtgactggaaataccagtatcaccaacaagaacacgacaaccacccgagaagagcattttatgagaactcgtccttgttagctcagttggtagagcgttcggcttttaagcattgctcgcaaggaaccgaaatgtcaggggttcgagccccctatgaggagttcttattttttgtttttggctatagaaatatttacaagcatcacactaaagcggtattacgacagttatagcacaatgtcggatgcctctatttagtgagtctgtcttaacacctgtagtgagtattgatatttttgcatgccaatggtgatgtttctggtgctacttctttatatacaatgacaatgcaattcataaggaaaatcttaatcttgcacagtttttgaaggttttgacgagaagaagggattcgagtatttttgtttacatttatctacgaatctcgatcacaacagccacccaactgtgttgcacaatgtctacagaacttgattttgatactgaagaaccattgattgacactgtcaggccgctaactaatgctactattacagtgcgagtgataaaatctttcccatacagaaatgttaagaatatcatcttcactgattacgatctaaaaaacaagaccgcaaaggatctatatgaagattgtatgaaaaagattcagaccaccggcgccttcagaccattccgtaatgtggtatatgatgccatgaaaatatacacacatgctcacgggtcgaaaaccgttaatcttgttataaatttcgatcacgatgataattgggttatggacattaatgattcttcaaagaagcttgttgaatacggtgttaaaaatgaaactgagatctcggtcttcaatcaagaagaatacgtctctttcaaagcaaacccagaagagaaatggctatagagtcgcactgcataaaagttatcgtcaaatcgataatatttcaaatttaatgtaagcaaaaattcatatgacaaaataacagcaatatttcttatttctatgtagttatacatatgattgctcctttaaaaccgaaaaatgttagcgtcggtatgctattgttgtatttcctttagtccaatagatggttgatcaattcacaggcaaactcgacgttagcaactccatagggtgtcgcactatctaagcctttccgggccacaatcccatcatgagcatttagtgttttaatatatacaggtacccgtatccaagttaatttagttaaattttgataaattgtagctctactttcatcgaaaggaagtttcggaaactttgtatgtttccactcttttgaatgagaacgaatgaattgtttccatacgtcattcatttgcgcagaatcattagtgagggtgtgatataaactattattctcaatggaccaatccgatccttggtccttaccgctatcttgttcatcattaatagcatcacctattacatttctaatggatgacatgatagtattgaaaacaccattttctcccgattctagcttccaatgtccttttctcaagagagaatggtgatgataagtagtaatataactgtagcatgttccaatgacattgactgtgaacaccagtgggaagaaaaatgtcattaacgccataataagcaatattcttgagaaccgttcttttaatgtgacaatggtttcattttctttaattctgtcaactgctgggtccaaggaatccaaatcgagtactctaggttgaacagggtactctgaaacgtctataggtaagttgtgattgaaatggtatctgacgttattccctgtttcgataaatggatcactgtcagtaataaaagaagtataaaatgccactgttctatcgttcttaacattagcgaaacataccctatgatgaaatcttgataacccataaaggtactcaccctgagacaaatcaacaaggattctgtcatccttattactgatgaatatttcggccccactccttccaagaatcgtcctgccaagcccagataacacagaagtcagaatcttccgtgacacgtaacgtcttgtcttatcactgggcaggtaaaagttcacaccaagatgcggagtagcaaatgtcatgaagatcatcggttccatgtgttgaaaaatatccctgcattcggtgaccatcttaccgataataaaccgagataccaatccacccatagaataaccaatcatgctcactcgatcgaatttttcgggaccataattaaggacaaacttacatatctcatccaatacgttataactcaccactctgatgccatgcaacgtcttaaggtacccggagttttccggtttgaagatcacaatatcatcaatatcatccaaagtcttttccaacatctccttgatggagttcatatgtttatgatttccccataatccatgaacgagaataaacaagtgtttcttcttagtttctgtcatctcacaagatcttatcttaacactggtcggtgaatcagatctaatcttttcctttgacacttgatcgtgctaacagtgtgtctgatcgttcgtcaataataccttaaaaatagaatgttgaaaaaaaaaaaaggaggaatgtatgtatcagtgataatgatgttcctcgatcaaataattggcatccaatttgattctcgtcacttaaataagatgcatatatggctgcttttgccaccaagatcttactgttagttgttggagcctaggcatgtgcatctgtgtgcataagtaaacgatgtggcttgtctgttaactatattctggaaatatgtcagcaaaggaaataaaaaaaaactaaaaatccgttgcagcgatgaactgtgaacggttcaattaacgtaaatgcggtgaaaatttgtttacttttgtctatgtatatgcatgtacttcttgaaagtcaggtcttcgtaaacagtttcagtagtgtttctacacagtcttggatcgattcaaaactaatgggttcagtttctctgagttcgtctctgaaagcgaattcagacgccttgtacgtcatcttgtacaatttttcgtgttgagttcgatgaactcctcgtagcctgagtcctgaaagtatgcactgagacagcaacgacataaattgctgctgttgatcgttgagcaagacttgtttgttcaacgagttacttttcagtattcgctgacgtttgttcttctctagaatcgattcgatcgacatcgttgctccagcgttacttggcacaacagattgtagttcgtcggctgataacggtatcaatttcttatcaagttcgtgtttagtcgataagtgaagtaccatcgattcaatttcgaaagacgcgtttatatcggtcttcaaacgcttgtagaataggaaatattcgaattgctctttcgtcaacacttgggatcccgttactttacatacaattcctcgattcctgtgtcgttgtctcatcaacttcgctctgaaataattgacgctggtctcgctagtagtgaagcattggtaccgttgacctctattgagccaaaacggcagcttatcaatgttgaccattccaacaacttctgccagacaatttttcactgcaatttggccatcaccgtcctcaaattcacgccacaactggacgtctcttatcacagtgttatgacccacattaagcctcaagataagttctttttctagtgtcataggttcatcgcgcaactctccaggtccaattcccctaataccaggcctaccgaggtcttctttcacgtttgctactttcacttaacaatttgaaactgaccagacaatgtattcacctcctttatagtcttagtttccctgtatatgaaagtccgccgttgtattgtggttcacggtgcaaaagcttagcttatatccattgttaccatacgaatcttttttctctcgacgctttcacggctccaaacaaaatgctttcagttttcaacattgaaataaagtgaaggcaaagaaaaaaaatgttattgctcaacgtaattgaacaatagacagccagaagttggaagtggttagagactacagaggctagagagtaccgttttggatcacatcagactctaagttttgaaaacgggaaaagggaggtcatctcttttttttttttgatttccttctcatcatgtcgacgttacaaccttctgcgttgaataagaagagcaaacgagtttatagcgttgctagggtgtatcaggatgcttgtgagaaacgccctcaagagtactgggattatgaacaatgcgtgatgattgattggggtaagatttcgaactatgaagtgataaaaaagattggtcgtggtaaatacagtgaagttttcaaagggaaatctgtattgaacgatataccatgcgtcatcaaggttctcaagccagtgaagatgaagaaaatttatagagagttaaaagtgttaactaatttgacagggggacctaatataattggattattggatattgttcaagatccaggatccaaaatcccggcattgatctttgaagaggtgaaaaatgtcgacttccgtacgctttatccatcgtttacattatcggatacgcaattttatttcacacaattgttaactgctttagactattgtcattcgatgggtatcatgcatcgtgatgtgaagcctcaaaacgtcatgattgatcctaatgaacgtaagctaaggttgatcgattggggattagcagagttttaccatccgggagtggattataacatcagggtggcgtctcgttatcacaagggacctgaactcttggtgagcttaaaccaatacgattactctttagatttgtgggctgtcggatgtatgatagcagctattgttttcaagaaggagccatttttcaaaggaagcacgaatgcagatcaattggtgaaaattgccaaggtacttggtacgcaggagttattctattacttgaaacattacggattggatcttcctgcagaatacaacgatatcatgaagaactacgaacggaaaccatggagctatttcgccaatgataagacgccgttggctgtggacgaaataattgatttgatcgaccatttactacgttatgatcaccaagagagattaactgcaaaagaagccatggagcataaattcttcaaaaaagatttctcatagtgtatgcctaaacggtaatatatatctgttttctcatctctctatcatcaaattttcttttccctcttatcttccatttatggttaactttgggggattcttcttctgtctttgattgctttccaattaaaagcatgtatactaataacatataattaatacaacacctgaaaaagaggacagaaacacatgtctcttttgcttaagatttaaagaagatgtaatattatgatagtcgttaattcattaaaaaggatatataattaataggtgtaatagctaccaaacctgaaagaaaaggctcttactagcgcaggcgcagagagagagacactactataagtaggaaaggaaatagaccaaaggaatatgaaacagggtggaaatagttacaaaaacccatgatcgaaactattattgcggtgaaagttcagtgatgagaattgaaaatgccattattattagtctatatttctcaatcacagggaaaaaaacaatcttttggtatcaaatgcgtaaagatcccagacctttgacggatttcgtgtagtatgctgtgttagtggatgggattttttaagaggtcagatttcttgggcgagtcagattacagttccatttcgtaatcttcatcgttttcctcgtcactgtcgtggacatcaagaatgaagcaatcctgcctcataatcatttcgttggcccatgtatcgttgatggcactagttccatcataaatgacaccactatgatcgatctctcttgtgcgaacactatcatcgaaccttatgttcttattgttcgagtggtgggagggtggagaaccgaagccagaagaattagtctttaccaaaataggcttgctattttcaaagatggatgaagcatctgaattggttggggaagaagagtaattgttatacgattgagaataagactccaagtcggagtccatgtccatagcagagaacatagaatcgggtgacgatttcttcttaggaatcaactgagtagcagcaacacaatcatccgataactgaggcccatatagtacagtcatatcattttccttattccagttaatacgtaaaggatcgtacttgttttcattaccgttcaactggaagttctccatcgaccaacgcctccatagacaatggtgtagtcttttcaaatagtagttataatcagattcatcttcctgggaacaactaggcaacctgagcactttatgtttaccgactttcaataaaactttccaagtctcacagatagcataagtttcttggaaattgtgatggaaataatcgatagctggcttattcaaattcgtaacattatctagcagcaaaaggtttttccggataataatcgtatcgtccaaactattggatatcattgtaaaggatatgttagatgtgagtcgttactatcaccttgcagataagaaatatattagatggtagaagaagtaaatcaacaaacggattaattgaacaaagatacacttatggtgctcttatatataaaaaagccttcgacctttgaacaataactactatttcttttgtagtttgttcaaccgttatataatttacaaatcttttcagaaagaatataatattcagataaagagacaccaggaagcatggaaaactcgcaatatatgaatttcaagaacccggtatttaacacgccggtgcaccgtttcttgtggtcgaacaatttggaccggaaaggtgaacccactccgatttatctaaggtaccacagacaatagagctacaatactatatttccaagcgtgtcagcagtgtcaattcagagtcatccaactgagattccaaccagaccccggtacttttcccagtggttggttacctgaatctaaaagaaaaacaatatggagctttcactgtaattatttgcagaaaaagagaaaaacagccaaaagaggttgctcggaaaagtggttctcctttccgcagctagaatgtgcagtagaaaacggttatttttccaaagaatagtggggcgggaatccgaaaaaatcataaaattgttttttctttctatggttctcttagaatcacaaggggggacaagaagaaaaacatctacgagacctatgtattacccgggctgatgcccgggtgtgttttctttttcttcgcttattgcttttcctttcggaaagatctgtacggggcgacctgttgtttcgatggggagccagaaaagtttttccgactggttggagaaggagatttgacagaaataaaacagcttgagtatccagctctagcggaggtgcgcagtgggtgtcgtaggaagaagcgggaaaaacggcagtgttgtttttccgggattcgtctcgtaaggtttttccgaatggtgtgaggaacaacttgatggtgagactttttggagatctcagttcgtcacattacgtagtggtaataaatcgtgttgatctgcacacgtctctgtttttgttgttgtcgttagtgattgataacagttgaatgtagtttcactgtggttttcttcttttccgtgcatttttgtttaatacttgttggctccatcgttgtgtcatttgtttaccatttgaaaaagataggtgcctcccgccgtcatttcgtcaggaccaaaggcgaaccgataaatggggggtaaactgcgtttcagaggggaaaaacagaaaaaaaagaacaagtcacgtgggcggattctatatgcactgttaccccgtctttctgtgatttttgtatttttacctatggacgtatctaatgatagtactttctcctatttaaatcacctttcacgaactttctcgtctctcatctccaagcgatcttgaagaaaaaaatttttttcacatctcatcgcatcgaagcttggactatttaaaaaacatgaaaaaatcaagtgaaaaatttttaatagttcttcatctcatcatatgtaaagttgaaagtgtttaatggtatctactttgtttatttcccttccccatcgcaaaactctagaacggtaaccacagctctagctagttaatattaatacacaatgtctcacagaaagtacgaagctccacgtcacggtcatttaggtttcttgccaagaaagagagctgcctctgttagaggtagagttaagtctttcccaaaggacgaccaaactaagccagttgctttgacctctttcttgggttacaaggctggtatgtccactatcgttagagacttggacagaccaggttccaagttccacaagcgtgaagttgttgaagctgttaccgttgttgacaccccaccaatcgttgttgtcggtgttgttggttacgttgaaaccccaagaggtttgagatccttgaccaccgtctgggctgaacatttgtccgacgaagtcaagagaagattctacaagaactggtacaagtccaagaagaaggctttcaccaagtactctgctaagtacgctgaaaacggtgcccaagtcgacagagaattggccagaatcaagaagtacgcttctgttgttagagtcttggtccacacccaagtcagaaagactccattgtctcaaaagaaggctcatttggctgaaatccaattgaacggtggttctgtctctgacaaggttgactgggctaaggaacacttcgaaaagaccgttgccgttgactctgtcttcgaacaaaacgaaatgatcgatgtcgttgccgttaccaagggtcacggtttcgaaggtgttacccacagatggggtaccaagaagcttccaagaaagacccacagaggtttgagaaaggttgcttgtatcggtgcttggcatccagcccacgttatgtggtccgttgctagagctggtcaaagaggttaccaccacagaacctctattaaccacaaggtctacagagttggtaagggtgacgacgaagctaacgccgctaccgaattcgacagaaccaagaagaccatcaccccaatgggtggtttcgtccactacggtgctatcaacaatgatttcgttatcttgaagggttctatcccaggtaccagaaagagagttgttactttaagaaagtccttgtacaccaacacctccagaaaggccttggaagaagttaccttgaagtggatcgacactgcttctaagttcggtaagggtagattccaaaccccagctgaaaagcacgctttcttgggtactttgaagaaggacttataaactcctcaactctaatagagtcgaattgagtaaaaagctttgcatgctgtaattttatagactagttttggagtactcaagaaagtgtttacactttctttcactatcccatcggctggttcataatatttcctgttgttttgacaactatctttaaatatgaaaatattagcatttgaataaataataattacacgcgcttccttcttgcaagttatttttctggagaagcactgaagagcctccgcggtcttcatcaacgctttcttctcttgctctttttccgatgattggagtactgtttcctacacatgtcactacaaaaccatttctcattgggtttgggtgcggctgataatcctacacaggggtaatggaaccattcgatggcacaagattcattatcacaagcaaccatgggtccatacgacacatctctacagaaacagtacgtctctgtctctggcttgtgcgtcttatcatgattcacatgttcttgctgaatcagtttctgttccctttctgcctctgggtaccttgatttcatagtgatcttaatcttgatcggtttgtgatgaggcaaaggtttcaatttcggttgtttcttcaagtgactatcgtaccttgccttaatctgagagaatcgctccaattcttgtttttcaaaattgagccgtgaatgttcttgccgtactaactctaagagatgttgcgcttgtcgcagcatctcttctgaatgacatccatctctattagtatcacctatatccaatgattgtatagtccagagggtgcgaatcacatcgcatggtaaatggtccagtgtactgagaaacccgtacctaacatcttccattgttcttgagctgtttccttctagccgattaactaagaccagaatggtcaattctattctaggcgttagcatgtacttactctttcttgaatggcttttgccatatggatatgaatggaaagacgttttacgttttcccagaaggaaaacattcacgtgacaagtcccagtcacgtgaatgacattgatgtttttgggatatggagttctgaccaatcacatcgaagaacgtgccgtcttctcataaacctccgcacatatggatattttcccgtacttagtgacttttcgtcgggaatatcgcccttaacacgcatcctccagtgcgcttaggatagaaaaccttcagaaaaacatcgctttcgaaaaataaaaaaaaatactttaaacataatcaatcacaaacaattatcattggattggacagaaaacttagcagagaaatgctcacagacagcgaaagggaaaaaaaaaaacggcttgaaaattttgggaatcgattttttctctatgtaaaaagcgatataatgaaaaatatctacaaaaatatagtatataattcttttcaaactagagaaaactttttggaaacgatatacatagattatttatatatacgtttagttggttatagtattaaccagggatttagtttgcgctgatcgatcaatcaattcaacggatttgatttaatatttatttttgaaaagaacggaataaaagaagcctgcgtcttttaaatttttgtcctttacctaactgtctatttgttcgtctttctggtacagatattaagaaaagaataataatacattctcaggatattatccattgtctgtgtgatacgaatataaattcaagaatatcagctttgattcatacaaatagttgttagaatatcaaaattcgggacatttttatcttttagaagagaattcaattaataggaaactaaagtgatatcataataataaacgatgttcagatcattttctactgccgctaaacaggccgtaaaaggtacttatgttcaaagagccattgttggtggtgctgctgttgtcggtattggtgcttcaacaatgttgtatgctgattccttgactgctgacgctatgacagctgctgagcatggtttgcatgccccaggttacggttggtctcacaacggtccattggaaactttcgaccattcttctatcagacgtggttaccaagtttaccgtgaagtttgtgctgcatgccattctttggaccgtgttgcatggagaaccatggttggtgtttctcacactaacgccgaagtcagagccatggctgaagagttcgaatacgatgacgaaccagatgaccaaggtaacccaaagaagagacctggtaaattggctgattatgtcccaggtccatatccaaacgaacaagctgctagagccgctaaccaaggtgctctacctccagatttgtccttgatcgtcaaggccagacacggtggtccagattatatctttgctttgttaactggttacccagaagaaccaccagccggtgttgtcttgcctccaggtgccaactacaacccatacttcccaggtggttccattgcgatgggtagagtcttgttcgacgatttggtcgaatacgaagacggtaccccagccactacttctcaaatggctaaggatgttaccactttcttgcactggtgttctgaaccagaacacgatgaaagaaagagattgggtctaaaggctatgatcgtattgtcctctctatacttgttgtccgtctgggtcaagaagttcaagtgggcttctatcaagtctagaaagattgtcttcaacccaccaaagaaatgagtttttttgaatattaatgtcgaaacgaataaagactaattcatatcaactctttctattttattctctcaactctctacttctgtttctccccatttccggagaaacttgcaaggtctcttcttttttgctacttgattgatcagtatttgattgttggtaatcaaatgtgatcttaatcatttagatcagagatacatcaaatatattcatctttccacccatacatcccacaccgtctgacacataaaaaaggattctaacaaaacaaaatggcttgaccatcaaccatgcttaaaaacatcttataaagagggaaaaggaagctcgattatcaagaatgaaacggtgaggatttaaatgaaaactttttttacgaacaacccctctctttattctcatcttctgagaatatggtacttcgggggaacaaatagtgtttttttcttacgaattagaaagaattgaacctcctcctttgtacgtcataatactactttccatgaagaaattgtcttttcattttttcttctggaacatgcgatacgtttatttatttgggaacaatgatctatttttctcttgatctgttactcttcattttgttttcaactctatcctctctgttcgaattctttacccatagtcttttgcctgccttttttccttctctttttcatggctttttaactttgatcgtttgttctctctctcaacacttgtaataatgaaagagaaacaaatgtcctcgttgttgttaattttattatcctgtcatccacattttatttattacgaaatttccctaacttatcctaaacttaacttaacttaacttatcctgtcaattaaaaaaagaacacctcttttaaaaccataaaaaaagtatcaacaaaaattcatcatttatcttcatgtctttatgataataacttattatttgaattgtttacccccctgctttgctcactagctgaaggagaaatccattgaactggttcaaaagttcaacgcatccacttgtatttcttttgcttcatcatatttattatcactgatttgcctatctactgctcttgcattcccggtcctacacatcatgcgcgaattagatttctttctgtgctcattattcttctcaaatattcactttactttgtttacaatctttgtttggaatatgcttgggaatatcgaagctgagtagcaatagcacttcatggaattgtgcaagcaatgaaaaccaattggatttagattatcttcggttgtttcactcaaagttggaaagtgagctcaattatataggaactcttcaacatcttgaaatatagtttgaacatgtatttgtatatgatatcacgaatatatatacatatatatttataatataacatagtgtattacaacatctgaagctattaactacgaggttcgcatattattacgacctaacaccttcatactttgggtttaagacttcaaagttaacatttaggtaaatattaataaaccaaagtgaaatttgaattgaataaaaatattccaagtttgcaaaacggaaatgaatactcaccagaccctccaatcacttgtaacaatcagccttgtagttaatggcgttaccaattatcctatactgagggttcccacaacataaaggtatgcaatcgtcataattatcacgtgacagacttactagctcaggttggtccttctcgttcttgccgtttcgtgttattacccttttaggaaagctaatgaatttctgaatcttctttctcagtaaggaaaagactttaaataattgcggcatctgagtattaattttgcagttgaaaccactgttcacactgctggtacctctttctaataacttcaagtgaggttttcttaccgctttagaggtgtaattgaattggtacaagtgaggcatctccttttgttgtagtattaacttttcgagacacgttgcgacgtgtgggataaaatatcaagttgctgaagttccgttcaagtcatacttcttctttgcggttacattcgatcacatacaaagcactgagaagagctgacagtatttattttgacagagcatacacttattgtggtcatataaatacctctaaggattctttcagtaaaaagggaaaagttttccgcacacctagagtacagattcactattaaaagcgagctacaagatgtgtagcaaggacggttctacgaacagtaacgttacaacgccaaagaaacggggcagacctgctattctaaaacagtactctgaccctatgaagtccccaatggctcaaacatcgttacagatgcaaaaatctcaacaatctttcaataagccattgatgcgtatcggtcattctccgactaagttcaagactcctcaaaggaaaagaagaggtagcggtacagatatctctccaccacattctgctactggctctacaaaaaaagggagatatagaggtgttgtgatgaattctccttcttcggctggttcgaaatctatcagaccaaaatctaagagggatgacgaattttcactttcgaaaactgatgatgaggatgcagatttggatgatccaagtaattatgatggtcatgacactagatctcttaaccatccccctagttctgctccaggaactcctttagatcaggtgttttcatcaatttctaggcatcataatgttagaagttcgcctcctgttatgtttaattccgactcaccaattcaagcgaaacgtaaattagctgttgacatgaacgaaacctctcattggaatgaggacagtactgtgagtgagaagagatggaaatttatgttgaacgttggcaaaaatggtaaagcttgcattgaaacgaactccttgaaaactacagacaccatagaatcagattcccaagctgaaaagagtcttcaacccccaaaacatttgttggaaaccccagttaaagtggctgatgttgacgaaaacggtgtggctagattcgacaagaaaagagttatgggtttcttgagacagatgaaatcgaaaaataagacattggatgacaaaccactccctgaacaaacaaaaaggtttactatcccttcgtcaccagcgggtcctccaaattcaacgggtacaattgctgaaccattgacgccgaaatgctctcaattgatgcaatttagaactggtttcactccgaattttaacattgacgagttacttgtgagtccgaaacttcaagaatcattgaataaaaaccttttcaaatctcctaaccaatacgtatttaaagtactgtctggagatcccctgttgatcaacgatcatcaggagacagatattatgaatcctcctcatagccaagaagtgtcagatatattatcatttctaaattctccaaaacgaggaaccaatttgagtaccccaccatctcatttggtcaatttcagctcaccaagagcgaatagcagaacattcgcatccaatttgaacaatgtaaagctgcaattgcctgcactcagcacccccaaaactgattcacatcaaagtcaacaattgcagcatacattgcttccttcaactcctttattgaaattagctactactggaacgccatcacaattcacacctataatacaaaaacaaatgaatgatgaaagcaaattcccattgacgcactctgtgcaccccatcaatctacgaaaaagtcaagtaaagaagttggaatccaatgatgatgccagaatggcgttgaagaaattgatcaacggtaattagtctcaagcgttccatactctaaccgattatttcacttctcgaaaacagtccacgtttggactcaatttggcccatttcataaccatgactgccgcctgtctttcagattttatgattctttgtaacaatattatacggacttccatttcgaaactagatacttttttatatactaccattacattaattccacattggctcatcaaaattgaacaaccaagaaagccctatccaggagcttaagaccccgatggagcagtaaatggagtagatcattagtcccaaaaactcatatttgtcgagagcggcgtacttgtgtttgagcacatctaaggcctgcacaaataagaccattggtatcaaaagcaagtaataacaaattgctaatctatcaaagaaaaaaattcttcttacaccgcttctgttgaccttactcgtctgacccatagcatagaagtataaaatgcaccagatgaaagtgtacaagaattttagtaaaaagtcttgagattcgtaaagcaatgggaataaagacacatatcccgcagaggccaacaatgtgaatggtgtcaaaagccttctatcgaaaggaactaagaaggaaaatggaaagataactaacataatagccttttcatgaacatgccagccaaataagaaggagacaaacccacatagggtcaaagaacctacaaacctcttgaaggatggatcgaataaaactgggacgacagccaagatctgatagaatagagttaataagaaagttaacttgggggtaatttgaggaagaacaacgaaaaacacatcttgaaccaatccacgagtgcctgagttgtttgactcaatcctgacatgaatatcagcagcagtctttggcatagaagtcaagacgatgcttagaatcttttgcaaatatggtagtttcaaaactaaaacggtaagaactttatcagtgaaagagtacaccgcccaaacatttggtgcccaataagcatgtgtgagacctctagagaagggaaataatctcgctaataattgttgccatgttgtaataaagggcaaaaaagccaacgaaaatatacccatgacaactgatgccaatttaagtaaattcgaccactgtacaattgatataagatctttgtaggacctaaatttgaaactgctgaaatcaagcacgtatgctctaagtaaaaagacaaaataagctggggcaagatacaaaaagatgtgcttgaaacataatgcaatggaaaagaacgccgcacatagtatatatctcttatttttggctgccacaattgaagatattaatattccgaaaaggaaaccattgtactggaagtgtatatggtctactatcaaaagtcctggagacaaaacaatactactggccacaacaaagttggcactcttctctgaaatatcactagtgttgatgaaaacttgaagggcggcataaagcaccaattcactcaatataactgtaattctttgaaatataatagttggcaaaccgaagctgccgacttttactatatccaaacacccatcttctgccactgattttggaacaaattgagaaaggaaccattcaaaatatgcaaaaaatgggggataatcaagagtccattgactagtagattccacataccatttattcagtgggagtttgttagtgatggccaaccaatttctatgtacgtcaaaatctgtgctataataacctgggaatagtaacactttcaacaccgtagcacatatccagaaattccaaagcgaataacgtcttgtcttcacgttattgatagcattaggtgcagaatttcgtttaccttgactaacctttgcatcagactttgccatcgtggcaattgtgctctcgggtctaccggtttattctcttttgttccagtcttatggtgatgtatatgtctgtataataacaacagcgattttaagtaaatattatttttgaccagattcaggtaagaaccaaggttctcctttagttatcaacattcaacaaaggcaacaaaagccaaatcagaaagcaacacgccatggagtttgataatgatcttggcaggtcagtctgggatgataacccagaagaaaacccattcaatgagttaagtagaacgtttgcaaacctgggcaaaccggctgatcaagagcaaccatttgaagaggaacatgaaccggaagaaaatgaatcgacaggcgatggcgtcaatgatgtgggcatcaccgataagaacggatggcatgcttctagctatcagacaccggtgagaagcagcgtttctaatgatgaatctcccttgaattctggtcctctatccgctagcgaaccaattcttgagagacacactgacaaattagaattgcttggttctttagcccctgaagaagatccattacatgagcttacacaaacggctactcttcagtccccaaagaaaagtgatcctttatttagtgggttagaaaaatcgccattgcacatctttgatgataattccacaggccatatcagttcacaacatcagcctcaaatgaaaacaaagtctgggaaactaaacaagcttttctcgagcgcaaggactcgcaggcatcctattaaaccaacacaagagaaagcttcgatttctattcatgacccactagtagaaagcctagtcgagaaagagaaaaatgaacagtttgttgaggagtcattggctgatgacaaagacgaaggtaagctgtcattggaacgtgaaatggattcacctctatatttaattgctgagagaaaggtaccatcctacattccgaaaacgaatagcacaatgtctagcagtaacacacaagagacaattgagaaattccagatttcggtcgttgatccaatgaaaattggagacattacgtctgtctacgtggagtataccgtcataagcaagtctaatttactagagggcaaaccaactagagttaaaagacgttatagagactttagatggctttacaggcaactacaacacaaccattggggtaaaataatacccccacctcctgaaaaacaagcggttggtagatttaaacaagattttattgaaaatagaagggctcagatggaacgaatgctccaacatatcgctagtaatcatgtgcttcagaaggatgaagactttatactattcttgacttcagagaaatggagccaagagtccaaagtaagagagcagatttcaggttcaaaggcctctcatgatagtaatgatatttctgatattcatatctctgaattgaaactccttggttctgaggatgcagaaagagtcttgaagaatggtggattagatacagagactggaggaagttttatgggactatcctttgcaactgctccaaaatataaggagcctgaccaattctttgtagatgctgctgaaaaaatggatatattagaggagcaattgaagcagttgtacaaagctttggaactggtcgattctcaaagatcagatttgtgttcggtaattaatgagtttagtgaaactttgaaagcactggctgatttggaattatcgaatcgaacatcagatctacttcaaaactttgcggaagtccaccttcgtataaaagagtctacttccaggagctcaatgcaggattcgctaacacttggcataactatcgatgataatctcagggcaataggtagtgtgaaagccgtgctaaatcaaaggaaaaaactcggttactatattctgcttgttgaaaacgacctgaataagaagcaaacccaattcaacaaagtgtcaggaaactctgccaatagtgaaaaggccacctcaattgaaaacgaacttcgcatcctcacatcccgatgcaataaaataaaacaggaatggcagacaatcgctgaagttataagaaaagatgttaaccaacatgacgtcgatacaattgaagattttaggaataacatggaaatataccttgagtcagccattgaaagtcaaaaagagtgcattgaaatttgggaaacgttctaccagaataatctataaattatgaataatggtttactgtcatttgtattatatatttcctaaacccttaacgtcttcttttttggcatcattttcttcttcgacaaagatgctgccaagtagatctattttgtcttgttgtttacctagctcgttgaatgaaacgatcatcccatcaaaggcaaaacataattctctggcgttcaacttgatactacggttggtattcgggacctttgggtatctttgtgagaaatgcgttagcaagagttttcttgcattcatcgtgtttgaaacttttatagcctcattaatggtactatgtctttttttcatagcttcaacttttaattcattttccaaggttgcctcatgaatcaatagatcggagtttttacctattcctcttgcgaactgattgaagttcggtcttgtatcaccagagtatgaaagtttgaagagctctttacttcttgcactcaggaagaaagaaatggaattacaatatgcccaatcgcagtgtattgccggacatgttctaaatgacattaagcgtaagttttgcatcaactttttgatctttgcggtatctttgacagcactttcttcgtcatgttccaaatcctttcttccttttgtagcataagttccatcgacatccatggataatggctttgtttgctttctgatatcgtctcctgcttttagatgttcgcagcttatgtactctatccttgaaagtatagctggatcttctagactaaaccattctcgaacaaatatgttatactgccatggcgtaataacgtaaagtttatcggcagtgtgcttgttgtgtttataccattctttaatgagacttgctatacccaaatggtgatcagcatggagatgacttagatatatcaactttacatctctgaaaagcttcggtacatcaatatcaggtatggtacggtgaatggtacccaaagtattttcccctgcatcgagaaggatagaacggttcacaacagtgccatcgacttcagtatacggtatcttcactaatgttgaaataacattacggtacttagatggcaatgcactaccagttccaagggaaattatttcaatttcattcaatttagttttattatcaaagttattgacgtgtacttgttcatgtacggtgcgttctaaagacgaaccttcaatgcataatggaaccacatgagactcatacaattcatcaatcgttgagctctgcttggctgtgggcaactgagattcatgtatgaccatattttctttaccaacagtgaaaggttccaaggctattcctttcatcttctcaaagacatgcatattctcgtttttcaccaaacatgatggcacatgttcttgttgttgaactaatgatgatccttctggtaggtcttttgggaagcagtggaaaaactcccgggagtaaactctatcggtaatgggaatgttataactttctacttgcaatgctttcaactttaaagttgcaattgctgcgctttcgtatgctatggtgtttggagaaattgaggaatgagatacataatgctggatttgatcatcgctgaacgtatcaaaaaattggaataaatcatcggtgatggtaacctcatcgccaaggaagtagtagatagctgacaattgatccgtaggataatttttaaattcatcaatgaatcgaggaatgtatttgtttgatggaatatccaagaccaaaactttcccaaagttcctagtttcactcaacacctgatcggagttgattacagtgccatcttctaaagtgatactattacccttagccaactcggcataaagtctacctttaggtacccccaatcttttagcttcttccacgttgaacttacctctaacagctgggaaggtaagctcgtaagacgtcgtcagattcttggctccaatggcttcaggcggtatatcaacatttaacgtgctatttgcagaaggatcctgttcatctgtgggatttacttcagggaacatacgagcgatgatattcttcaagccattagtaaaaccgagcgactgatgttgttgtacacattgatctacatttgcactattgctaatgacgattgattttacagtaatagtagagtcctgataacattccgaatttttcaacgtggaaacctttaaatccaaaccgaacctgaacacaaaatatctccaagtactaaccacgtaatccaagatattagatccataaaaaatgcttatatcttttttcccctgatcactagcagtcaagattaaccctggtaacccaccgatgcaggaataatccatctcacctgttaaaaatattccgttcaatttcccgaacttaacctttgactcattacaggctctttgagaaccttctcctatcttaccgaagaagtatttatcaccatgatcagactgaagcagtagcaatggctgcttagtatccaaacagggatgtgtaattggaatcaactggtacattgtatttaatctttgttgggatggtctggatgatctcttcttgactgaggattcaagaaaccgtctggtcactagtgcactggtagaaaaactcaagtaacgcaacttgggaaacaatatgaaaccgcagggttctaaaaggatccaatgaagtaaaaaaaatataaacagcagaagcagatgctgtagggccagtaaactcaaacctagcctaatagtattctgttgatgcgaagtttacggtgtgaaagaaactcaggaaaaaaaaaagtatacggatatccggtcgctataaacaccaacaggttgaataataacacccttttatcccagtgatgatatctcatatttcacctcatgtcatgtcatctcatcgcatcactacttctcactttaaacaacttcactacaaaaaataatacatggaactgaattagatttttcataaaaacagacaatttctgttgatgaatctgatatttccagtcacgtgttgttaaattaaaatctttggtatctggtgaatccatagtgtttattagctatatatctagtaatgtatgttgatgcacctggtgatctgtcatgactgtgttgatcgtctttgtccagatctaatacctccttatataataactcagattggttaatgatgtttcaactagaaacaatccttatgtatcatcttgatacttaaccgcctattacattggtagttacccgatcatagtttatgatccgtttcaataattctgctttgataaaggatttcaaccttggcaaaaccaactatagaacgcgctagtggtttagtggtaaaatctcagtttcccatactgaggccccgggttcgattcccggctggcgcattttcttcttcctttttgttatctattacataaagcacatctcttataccacaatacaaattctggaaccatactatgcaattacaagccatgttaccttttttttgtcttcctataacttcaaacgaattagtggtttctctattatgcacccttgtttccccatacagaagaaccctttatcttatcagccgtttcacttttcccttatcggagatcttacttccacaatggtttgtttaaagtttccatagaatatcactgaagcctgctgaaaatgacgaaatgtgaaaaaaattcctgggccgcatatataaaagggtgatacttttgcatttgaaggaagcaactcttccatcaacttacccctttattatccgatacatgtgtaccgaacaattgtgaaccagctctatcaagggtgtaattgggtgcgtgtgctatagacttattatacttttaggttacttgcttacggcaatttgttattgcattcttgacataataaacttttaatttaaaagttatagaagtaaaaatagtccatatacttctctgcgacatcttagacctacagctcgtatatttattagtatctgttggaaactaagaaacgaaatgccacaagctgatgggtctctcgagaataaaggtgcaaagattcatttagttgttttggtccatggattgtggggtaaccggtctcatatgaatgagatatgtaactatttgttatcgttgaatgattccagcgctggccacaaatctcttaatgagatgatagttgttcatcaaactcatctgaacgagggttataagacttacgacggaatcgatgtttgtggtataagagtctctaaagagatcaaggatcagattaaccattacggaagcgatcatgtagtgaaattttcgttaattgggtattctctaggtgggttaatctgtagatatgcgttgggtgttttgtaccaggcgcagacgttcaagaagaacgatatagagcttgtcaatttcatcactttttgcacccctcatgttggggtcttagctcccggtaataacgtagcagtgaacctatttaacattatcgttccattagtgttggggaatagtgggaaacagatgttcttaaaagataaatataatggttatcctttgttatacgtgatgagttcaccaagttcggtattttataaagcgctgaaacaattcaaatacagagccttatatgcaaatattattaacgacaagagaaccgcgtggtggacttcgggtatctcaaaaaatgacccattcttcgatgtcaatgaaaggaacggccttggaaggttccaatttgttcaaggatatgagcccgtgatcttgaatcataactcacctttgttcatcgcacctgttgccgatgaaatggattcatcttatgacgaattggaagagttacgaaaggaaaacgaaatagatccacaggactattatttcttgaattactggttcagtaagatgttacggtggattgctgtctttattaacttaatcatcattaccccactttggtttatctggtttatcatatctggtataatggaaacttgtaaatctaccgttagggccactacatttgcaaggaaatattccatgtattttataaccgaagtgcttgatatttcaaccgacaggactgagtccaacgacgatacgttttccatatcatcacccactttgtttgagccagccgaaagtaactacgaacttcgaatcgaacactctttgaccgatcagagagataatttaattgaaagtttgttcgacgcaattgaaaggaaagaaacgcgaactgcaacggtagaaaacatcaacgataaggatagcatctatgaacatgatccgaaagtagacgtgacaataagggagttggaacagtattcagtagaagagctcatctcgatgaaaaaaccaaacgtttccagtgataatttcaacgatgagggcgagctgttcaaattgctttcaaactttagcttgaacatcagcaagaaccaattggatattatcgaatccttgaataaactctcttggtccaaattccctatctatattcgcaaaacaccaagcacacacgctgcatcgattatcagacatgctgaccctaattttgtcgagggtcatatagttttgcaacatttcgtggacaatgtatttcaacttgcataatagtgataatcactggctttgatagataaatgaaaaaaaaaaacactaatccaactgtaacgtatctaacttgtgtctaatttgatttatccagtcatcattgaaaggatttatcacacttttcaaataatataatttgactttctggaagaagggtacgatagcatcatcctcgcgcatattgaaaccaattacaatcttcagacccttttggcccaaatattccccatagacaacgatctcgtgcatttcaaacaagtagaacggtggggcgtccatgttaccttttgttgtctcgccgaaatagtctaatgccaaatttgataagacattgtatttgatctcaagctgagatgattctgtatccattgcatgcacaagtaaaggtctatcatttttgtctaagagagatacgaatagcgttttcagcatcttatctgccgtcgaggttgtcatatctgtcaagttgtatctccccggtaaactagcgtccactttacttattattcttttgtcctagtatctttctgtgaagtgaagctagcattattatacttcattttcagatctttcatcgttcagttctttagccatttcattaaaattcatacatgcacatacatacatacatatatttgatacagaggaagatatacaacgtatcatagtaagttctggttatctataaaccacgggtagttgttgaagatctccttcattgcgagactcattttctgcagtcgccaaacattcacaaactagccttaattgatctagcagcctgtctgccaaatacgacacattctaacaaggaggaaccacctaatctgttggcaccgtgaacgccaccggaaacttcaccggcggcgtaaattccagtagcaatcggattaccttcagcatttagcacacgagactgttcgtcaatctttgcaccacccatggtgaaatgaactactggagtgattttgcccacgaaaatggtagaatcctccgaaagagtggatgcaaattgattttccctatgagtacgaccaaattggtcttcctttgaaatgtccgaataagtgaccaattcagagatcaaggtattggcatcaattggcaaatctttggcaaaatctgcaacagttgtttttgttactaatttcttgaacatgtagaagtcaagatttggcttataatttccatatagatcctcactcatgaccatccaggcagtttgtgatttgcatttggattgaatagctgcagtaacagtgtcacgagtgtttagttcattggtaaacctcaaacctgtgtcagggttcaataagataccacccaaacctcttaaagcttcagcagccaagaatttccagttggactcagggtcattaggatcgacaaagcctgttggatgaacctgaatttggtccatatcaattaatttagcacctagcctttctagtaaaacctgcccttcacccaaagtctgatcaccgtttgtggttggtaaatcgactagatgtggggcatatttttccaacaacttcttgttgaaaccaaatccacctgtacagaacacgacattgtttgtttcaatggaatgtgttccttctgaatcctcgtagactacaccatttaccttattattctcatcaagtttgacatcaattaccttgctattcaattggatcttgacgagatctgcgccatacgattgtaacgattttttcaaagtgtctacaatctggaaaccgggtggcagtttcccgctagatctatgggttcttgaaaccgaatgaccacccaattgggcaagtttatccaacggaatctgatgctcagtttgtagccaagaaatagcattcgctgaatctttggccaacttctccatcaatgtcacaatacctttccctctagcagatttgatcgtatcatctgcaaataactccggattatcaattatcttaagtttttcttgagtgtcggtaccagcaccattaataccgcttgacgccttgatcgaattaccaccaatgcttcctgtcttttccaataaaactattggaatattaaacttcactagttgggtagaggtcgttaatccagctaatcctgatcctataactacaacgggtttagacatggttgcttgattctttgaaaacaacgagtagaccaaatatacaacaacaaaaagtaaaagtattttaaggtatcgttgtcgcatttaaaaatataccctgcttatcatcgctgatcaaatgtgaacggactcatgctgaaatctcgctgataccactttttatacttcagaacccttttttttttcctaacaggtgaaaatggcagacaacagctgatccaagaaaaaagaacgataccactgaacggctgaaacgacaaaacgttccattgctccctatgcatgtctcagagattccagtatttcatgatgatgacacatgaaatgacacccgagttcacattttctgaatgtaaaatatatttcagttgaagtgaagtctatatatttggatatactttacaaaggagtttacgctgtgtagaaaccattagtgttcgactcatttaagtcaataactgtggtcgatggcgacttaaagccgtatgtagtcaatctcccaaacattagaaagagcaaagttgaatgaggagaaagtgaggcattgaaaatgtgcctttttgagctttttcgaatgaaaactatgcgagtcgtttgcaaaacgtatctgcacatattctataacttcattcgaacaaagcgatacttgcttttcgtattgtcaccaacctcatatatagagccaacttcttcgaagtataagtgaggtaagagagaaataatgaaaccaaacgaaccaaacatatcagtcgattccaaggatgctgatctcattgcttctgaattacaaaaacagaatgctagagtgttgtacatctctgaaaccacctttgtccctctgcaatagggtagtccaagcgctgcttgtaccaatggtcctcaaatgtatatgttagatagattaatatctgtgaatcattccatttgaataataaaatacgataacaaccataggaagttagatcataagagaaaaatatggatttttaaacggaatccaagactcgctagtgacccagccatgtaggaagtacaaaacgatgacattgtactgatcaatagcacgtgtagtcttggatgttgaaccaccgacttgaaatacacaaagtatttcaaaagtgctctttcttgtcaagaaacgaatgagacagcaaaggtgccacattcgcatggtgatgttgtcagaatagttcaacctcattggagaatgcaattccaatagtaaagtaacgcttattttcttcaataagagaagaaagtattactgtttgtccgtgtatccaattagcatacgtcctttattgaaaaaagaggcatcttctcaagaatttctcagtgaaatcacgagcagccgcttcaggacatttgtctacccttcatatggtagaagaaacatttaaatttaatccgataatgccaataatgtgtgtaattaatagtgcgtgtaacaattaaaagaatgatatgcaaaccataacgcgtgaaagccagtaagtacaatcagtacttgtaagtcttgatatcactgatagggttaccatggatatcaaaatcagtagattcactacggtagatttttgttggaccgttagtgtcgaatgggttttcctttgcgtattggaaagtttccaagacagcagacttaacattttccaaagtttctctggtgacttggtagtggaaagaaactctaccacccatcaatttgaccccatatttcaaacctttcttgacaagaacgtctgggttcatctttgccttttgcaagtccaagaagacgaagttggtgtcagctggagactccaatggaataccgttatctttacagaatttagccaattcgtgggccaactggtgagagtatcccatcttagtcttccagtcaccgttcacagcgcaaagtgccattctgcacataatacctgattgtctaacaccaccaccttgttgttttctgaaatggttacatttcttgacaaacttgttgctaccaacaagaacagaccccattggagcacccatggacttagatagacaaatggagatagagtcgaaaatttcaccgtactgtttcaaagagacaccggattcgacaactgcgttccaaattctagcaccgtcacagtgtaatttgatatcgttttccaaacaccaccctttgatacggatcaattcttccaatgggtaaacgataccgtgcaaagtgttttccaacgataacactcttgttggcgcaccgtgaatatccccgtcgtccgggatgtaatgagccttgatatcttccaaagtcatataatcaccgttagatgggatcaccggagtgaccatcgcttgagacaagattgccaacccagctgcttcatgagtataaacatgagctctgtaatcacacaagatagagtatggaggttggaatagatgcgttctcaaaccaatttggttcgataaagtaccagagacacagaataacccggcttctttaccagctaaacgagctacgacggtttctagctcaatggtgtcgacgtcttcgttatagactgcatcaccgatggaagcattgaaagcagcttccaacatttccttagttggagtggtgaaagtatcagaccgaaggtcattggcagctgaggtgtaagctggctctgaaggagcagcagcagtagatttcttatcagaagcagtcatttatgttgaattgatgtgatttagttttattggaggggttgaacctaaaataaaatggaactggtaatgttgttgtggattcacttaagtcaataaagtatattatatataaacaaagtgactaaatacaaaatataacccgttaggtttgatcctttgctatatatgatttttatatactgctctcaccatttataatcaaacaatatttatcactcaaactgccgatgagtaactcgacctgaaatatttcactgcttcaactttttccagcattgaggcaacaaacagaaaaaacaaaaaaaggaagaagagcaagagccagtagccaaaaacccttggccgggttaaccgagcagaatgccctagagcagtttacactggtagtggtgggaaatgcttattgaaaaattgtcaagaaaccattggctactttcattcacttcagcaactgaaaagtcaataagaaagaaaaaaaagcctcttgcctggctccagcctaactcagagaattccctctaggttataaggtttagacaggtgcatttttccatttctgtcgctaatccttgccgagagagaaacctggcgaaaatttcctacggtcccagtctcgccctagcagtgacttataggcggttcctgtgcagtgtcatgtttttcagggtacataaggtggtgcgtaacagccgggtaagagatgaaaaagaaaggaaaagtgaccaagtgagcatatgttgtttcttttgtctttgtcctttgatttctttttctctattctatgaaggtgaaagagcatgtggctgaataagtgagtaagttagttaaggttcgcgtacggtaatttcctaaataggaaattaccgtcgtgggcagccagcccacgcttcccgtccaccggtggggcggaaacggaattgccgccgcattcggcggacaggaagtgagtcacgtgggtcgcttttctctatctcgcttagttctgaatcacgtgacctgaagactggaatacccttttcttgataatatctatcatattagaacagagattaaaacagacatcagaactaagatcagttaaagatcgatgttgaaaccgcaattgttcgttagtacaatagtttagttgcgagttgacgtgatagaaattatattcgcttgccatggacggaatggataggattgaattcttgaagcatgttgctgctcagaacgacacaacaggactacgattcaaacaaccgacatggcacaagcatctgaagcgtaacaagaatgcgagacagttgatttcagacgaatggaaacgtcttacaaatacaaaggaaaaacaggatggagaacctgaagacccagaccaaaatagaaccagattatcatactttaacgtacaggcatatccgtctactaaacctgcaaagaagtactgtgatgtgacaggcctgaaggctcactataaagctccgaataccgggttaaggttccacaacagcgaggtatattcgctgataatcaaacctatggcaccgggcgcagaacaagcgtacttgaagctaagaggtgatcatttcgtgttgaaatgatctaggcctttgaagttgtgtaaaccatagtttattagttatataggatagtcaattaatggatattcattcggaaaaatctacgaaatgtagaagcgacataattccattctacttctagtatacctcttgcgatgacaaacggtagcattttccggtagagtgcttcttccttctaggttttggtgttgatgtttttttatagtttcaacatcggaaagtttacaaaatgttctgggaactaaaattaatcatttggtgaatcaatgaaaacatcatcggtaaaattataaaagtacatatttaataaaggcgcaaagacgccatcccgagactggaacactcagaactgtaaacatccagcttgcatatttggcagctatgatcacttatgctgcttgcacgttgtttgccgcagtttgattatggtatagacttttccagtttttacatattccggtgttcaagattgttggcttgttgaatatcgaattaccacaatcgaccaaagtatctgtggataagattactcaagaaactataactctacattgggagaatgagcctgattgtatctattcatcaacagggctagacgaatcgcatcacagattcaaagtactatcgtataaactttacttgaacgggaagctagttggtaattttccaaatacgaagagaacttacacatgtgtttcgttacagggtttgaagccagggcagcagtaccaaatagatctggtcaccgttaaccaattgggtttcactaataagctacctaatgtgtttgtcatgacgttgcctgttaatactaaacttaccacagatgcttctatgtcgccagacttcccagaagaagctcaagtgatagaagatataactcatctgatacctgcagaagtgaaatggagaaagcctctgatgattacgcaatcctcaaaaactatcaccccttcttattcttctttaactactcttaacgatctagacgggttttcaatccaagacttgaagaatattttagtttgttcccaagaggatttgcatgatgtcttgcagcaattttcgatgactttacaagatttcaatgacacgaagctgcagttacaaatggaacttgataactttaaagttcaatggaatcatgaaatcgaattgaagaaatctatgaaatccacaatcaactctttagaatcatcaaaagtattgtatgatttgaaaagggaaaaattggaaaggtcaatcaaacaattggaaactaagatagcaaaaatgaactctgacatggaagcttgggccaatactgatgatattgataagaaaaaatcgacattagacattaaatatgaaaagatgttaacagagttaaacaatgagatctcggccacgtccaggcaaataaaaacattacaaaatgtgattatagaacaagaggacgaaaataaaaaactcaaacagttaaaaaagcatatggataatgaaccaaacggttcaggaacgacccaggttcaatcagcagatggtacaacgatcaattggactcaagtgatgaaaagaattaatgattctactttatccaagtcagggttattgtcttcaagcggtgatgatctattgaatacgttaccgtcgcaatctcaactagtgcaaactatcagatcggagattgacatggactctaaattggataatcaatggaaagcctctaaacatttgtttaacaaaagaattgaccaattggagaaagtatggaaagatatgcaggcggaaaatacacaacttaagaatgaacttacattacagacatactcgatgtctcaacaaccttcacaacacggtattaatggcgatcttgctggtcagaatcaaccccaagcgcatcaattacgcctgcatgatccttcctcctatacaaattataatacatctggatctttgctggcgcagaccgtcgcttctgctccatttagctcttggctgcaacaaggacagcagcagcagcagcatattgaccataatcagattcctcactcacatgatcacgcccatagtcctcctttgtcaagtcatgaaactttttaccacaatactgagtatgaggattcctcgcatctgatctcagctcttgaaaacatggtttctgatgttggtgacaaaccaagaacaacgctgtccttcacaaatgaccaattggatgactactggaacagttcgagtcaaatatctcgtcctttcagtccatcaagccagcagcaccatttgcagcagcaagcacctcaacatatggcgtctatcgggtcatcccaatcatctctgtcgcctgccccacaattcaaacaatccgatagaaacattttgggggttcttaacgatcctcaaaatgatgacgttatctctttccagtcagcactgaacaatggtccagcatcatcaccgatggtaattccttctaaaagcatgcattctgtgcctgatacggcattttcgccatccttccacagcatctggaatgacagcactgttgcttcaccacattcttccaaccatgtgagaactgatagtcagcagaaatcgtgggtgtttaaccagcctgtcgaaatacctagcgaacctgcaacagagagaccaaaggaaagttcaactcgtcgaatgtctaaactgtttgccagagggacacagttgtttaaattaccaagtcatgactcacaggctagttaaaccttcaaccagccagttgacaatattattataacttactaatctttggttggtatcatcattttcattcataagaatagaataaaacgtcatgctgtggatatgagaggcaatcattaaaagcgtatatagtacaactatgataaatatcattccccttatatactaaagcctaacttctcgtagctccgattactacaacccgagttgcttctttaactcattctttcttctttgcaccaaccaaagttcgacatcttttaaggatggaacgtcaaaatttggtatcacaaaagaagggtcccgatcagaagaatgaatagttgatcgaagtgagccagtacgtttcttctcatattcaagaagttcatcactgttatttcctacaaaatagtcgtctttcaatgtactttcccatcgtttgattttcctctgcaactccgctttcttttccttcccacttctttccttctctctttgttccttggattccctcaataatttttgaacctctggtaattctaaagctctaccgaaataccttttcccatctatgagggttccgcctgtggtatttaactgcttcctcttcttcaaatctggaccctttaacttatttctgatatggaaatcccatctgcccttctcctggaatagtttattgagttcatcgtttatttccgtgatttgagactcgtttaacgatggatcatgaatctgtgtcacacgttgacctatctccttcacaagctcgtttctccatcgaagtgcttcatccaacttcgttaccttattgatcctggtaggtcttttcaaccgcgaaaaatcctgataaccaccggtttcggcagcctgtagctcctggtatcgcacgagaacagagttcgctttattcacgttacgactcatcgttacttcgccctttctttacctcgatatcccgtataatcatcgatttaactctctggttttcttctttgggattggttcttgtagttttatttcatgtcctttcatcttttcttaatatctgtcaacataaaaaaaacataataacatgaaatctatacagatagaagacgacaagatagttacagattaaacagtgctataaattccgtgggcaacgcgatctgatctactagaaagctttcgttggtcactccaaatattcagggtttatagctgtgttcatttgctggtttctacggcgagaataatctgaatcataactaaaatcaaaaaaaaagatgcacatcaattctgtggttaggaactataggttcctcatcggggccttaactgctttgatgttgcttcttttgctaaggtcgtcagcatctccacaagttggttcattggcgaactccaataaagtcgacacaccagatgggctaaaagttcctggtgcttcttcaccaatcagtcaaaatatcaatgaggattcacaaaagcaaacagccaaagaccacacatcccagaatttggaatctggttccaattccctttccaaatctcagtgtactgagggtcataagtacgtggttatgattgatgccggttctactggcagtcgtgtacatgtgtatgaatttgacgtttgtacccaaccaccaactttgattaatgaaactttcgagatgttgaagcctggtctatctagtttcgatatcgatgctgtgggagccgctaagtccttggatcctttattgaaaattgctatggatgcggttccaaaggataagagaaattgtacgcctgttgcagttaaggcaaccgcaggtttgagaatgttgggtgatgaaaaatcttcaaagatcttggcacaagttcgtaaacatttggaacaggattatccattcccagtggtcgatggagatggtgtttctattatggatggtgaggaagaaggtgtctacgcttgggtcactgcaaactatctgttgggtaatattggcgctggttctaaattaccaacggcagctgttttcgatcttggtggtggttctactcaaattgtgttcgagccaagtttccctcctaatgaaaagatggttgatggtgaacataaatacgagctaagtttcggtggtcatgattatactctatatcaattttctcatttgggatatggtttgatgcaaggtagaaataagattaacactgaattggtcaacgttgcgatcagctcgggaaccattactaagggtcaaactgcaagaacttatgaattgagctccccatgtttacctccgggaaccactgctgaaggcgagaaagttaagattagtgatgacgaaatttatactgtcaacttcaagggtccaaaggttccggctggtccacagtgtagataccttgccgataagatcttaaacaaagacgctaaatgtaacacacctccatgctcattcaacggtattcatcaaccatcgttggtccacaccttcaaagaaacaagtgatctatatgtgttctcgtatttctatgatagaacacagcctctcggattaccattatcgttcactttgcaagaattacaagatttggcaagaactgtgtgtaacggtgaagaagtttgggaaagtgtctttagtggtattgaaggatccctgtctgaattgagcaaagaaccacaatggtgcctagatttaaatttccaagtatcactattacacactggttacgacatcccattgcaaagagagttgagaacagcaaagacgattgctaacaatgagttaggatggtgtctaggtgcctctctaccactattggagtctgctaattggagctgtaaagtgtccaaggttgagtaaaggtaactcaattcgaaattttataatcatatacatcgtttaacaaaaatacacgtaaatacgctagtaaaacaccaatcggtcgttgcgtggccagaaaggattgcaaactaataaattgtgtcgatatataagttttggggctccgaaagagcgtcatttacctgatattttttagcttccccgtattttcagtaatatcttatctaagtgcatcactttccttcaaaaacatgctgaagcttaaaagtaaatgaaaatgtctaagagaaagggaaacactcaatttgtggaaagaaaagcttgaaagaggttccactcagacggattctataggtgcaaggaaacgaatcgatagtgttctgcgaaatatggttgaaggacaccctttggagaaggttctgagtgctagtgcactaacttcaagcagtaacagctcatcaagaagtagtattcccttgacatttgaagtcactcatcaacacaagactcagatcaagcggttccagaatgtgttaactagtgatagtgccacccaagatgacggcaacgatgaccctagtagaaatcaagggaatgaggtgagtgaacaatttcatttgctgcagtatcctgagcagcatcaacatcaacatcaaaataaacatcaacatcaacatcagcagcagcacgaaaaaggagatctggacgaggtgctctgtacccaacggatgttcaggaaactatctactgggagcgatgatgtgaaaaaggtttattcgcatgcacagctatcgtccactgcacatggagtgagattattatccaaaaatctatccaacaccaaagtggcattagaagttaagaaattaatgatagtaactaaaaggcaagatgattctttgatctacttgacaagggagttggtagagtggatccttgtcaattatccaacgatagatgtttatgtggaatacggttttgaacgaaacgaatctttcaacgcaaaagagttgtgtaaagacagtaaatgtggttcgcataagattcaatattggtctccagaatttgtgaaagaacacgaagatttctttgacctaatcataacacttggtggagatggcacagtattatacgtatcatcaattttccaaaagaatgtgccaccggtcatgtcatttgccttggggtctctaggattcttgacgaacttccaatttgaagacttcaaacatgctttgtccaagattttacaaaacaagattaaaactaagatgagaatgcgactatgttgtcaacttttcaggaaaaggatcaagaaagtggacgaggaagcacgcaagacgcatattaagtacacaatggagggagagtaccatgttttgaatgaacttacgattgacagaggtcctagtccgttcatttcaatgttagaattatatggagatggatctttattaacagtggcacaagcagacggtctgatcatagcctcgcccactggatccacagcgtattccttaagtgctggtggttccttggtataccccagcgtcaacgctattgcagttacaccaatctgtcctcatactctaagtttcagacccatcatcttgccggatagtatgacgttaaaagtgaaagtcccaaaggctagcagaagcaccgcatgggcagcatttgacggtaagaacagagtggaaatgaagaggggcgactacatagtgataaacgcaagtccgtattcattccctacactcgaagcccgcagcacagaatttattgacagtatcagtagaacattgaattggaacgtcagggaatcccaaaagtcgttcacacatatgctctcaagaaagaatcaacagaagtacgaaatacacaccgtgagaaccaggcaggattctgaagaagaggaagaactcgaagacgaccaaagtgatgattattctactgactctgacagtgaactgaacgagtaaggtcggagaaaaagttaataccggaggaaatagcggattttctgaagatctgcagactattttcgcagctcacatgtgtttttataaaccgaacttttacccaattagtataactgaaatgtcttgagagtgtttatatttacgtttaccattcttaccagtaatcttcctgcaaaccctacaactccatacacactttgtacaccactcttcactggttgacccccccattcatgtatttttatttcctatataggaagcctaagaaacaatcacaagtttatttgcatagatatctgcgccatttgttgcggggagaacggccaagaactgcgtactcaactccaagctctgtgatgtgttgttggaaagctacgaaaaatgcttcctctttgacgcctttttttaaacatcgcttttgccccaattgggtaattgctgaaaaaattctcaaccgaaatttctcgaggcgcattctgcgaaaggtggaataaacagaggagatagtacagcttcttcttaggaacaggcttagtgtgctattacggcagcccggcaagaaactatatgtacctgtatatcgatatatgaatttatatatataaggatataaaatttgaatgaaaacccattcaaaaaagtccaaggtatctcttgttgcattctttcagttataaatagaatctaagattcaaggtaacataagagagccaagctcctcccacgcctataaataatatacttttgtaatgagatcgtttgctaaagtgttggccctagcggctgttgcattgaaagttgtttcagctgctgatgagacaaccacctgcagtgaagattctcactgcccggaggataatccatgttgtaatcagtacggaacatgtggtacaggtagttactgtctaggtggttgtaaccctaagttttcttacaagaaagaggcttgtatgccactgccagtttgtcgggacacaattaccatctttgataattatacttccaaaatggcgaatctatatacatacctgggtgatgcctcaaaggccaattggacttacgaaggttatccgatcgattatgaagacgaaaatgctttgattatggctatgccaaaaaattctggcggtactgttctttcctcgactcattatatgtggtatggtaacattaaaacaagaatgaaggcatctcatggtgctggtgttgtctctgctatgattttgttctcttctgtgcaggatgaaattgattacgaatgggttggtgctgatctagagaaggtgcaaaccaattggtactggcaaggtgctctgaactatacaaactctaagaatttgactgctacgaacaacgatgaggattatcacatctatgaaattgattggaaggaagatgttatcacttggtcggtggatggtgaagttggtagaactttgttcaaaaacgaaacttataactccacttccaagcaatacgaataccctcaaactccatccagagttcaattatctctatggccaggtggtaatgccacaaacgaacaaggtaccattaactgggccggtggtgaaattgactgggactccgatgacatcaaagattatggatactactacgccgtgttagaaagtgtgaacattacctgttatgacccaccatccggtaccacgaaaaacggttccgaagtataccaatactctggtgaagacaactggttgcaaaaaggtgtctttatcaccgacggtaacactatattgaaggattacgataactctggtttggatgacaataccccagacgaaagttcttcctcttcttcttcttcgtccacttcatcctcatccaaatctagttccacttcaacaggaagcagctccggatcggcttcaacaacgaccactgctggctccaatgacgatactgacgagtcatcttcttcttctacaagttcttccgcagcagcaggattcgttcaaaatatgtcgactacttctagctccggtaactccagttctgctacatctactagtgctgctggtgctgaaaagaacttgtcatatgggtttggtttaagtttaatttccctattgttatcattgctgtgataacaccgaactgactttgtaaatcacacgacgcatacgaaacataaaagattctcaaaagctcaacaaaaagattctgtggaaatttatatagatgaccagtatcttttgaaactcagtgagcatgtacatatacagacttttaattaaatgcacttttttgatcttttgatctttatgacgaagaattttatctaaatacggagatgtaaaatatacattgtagataatagacgggatgtgtgataacactaataaaataattatgatagtaataatactcgatattaaggcaaaacctcacggtgttcactggggaccgggtgttaagataaaaggaagaagaaagagttgataatagaagtagtagagttgttaaaaaataaataaataatcataaaatttggtattcttggaatagtagtgcatagtaacaggattccaagagttgtgatagtaacgactttttgttgattcaccttcattttttcttcatttgtatcttggctcaagttgataacttggagttttggttctatcatgaaaaggttcgttctttattgttttgcggtatatcaaatgctgatccttctgatttgaaagtctttttaccagtcaataacggatataataattacaagtataacggcaaaaaaacacaacagaatggacgagtataaggatgaaaagaagatcacatgataaagaacaacgaaacgaaaaatatacaagcgttgtttcagagataaaaatccgtaatctcttgttaaaattccaaaatcctctttttttataagcagcagcaaacttagaagaacgttcatagacagttttcaaactgtagaaaaaaacattaaggaattttctctatgcagagagaaaaggtgaaggtgcaaaataaaagcgttccgggaagggtgagatggtgtatatacataatatcaatctaccatgcgtgcatgaatgaattttttcttttcaaatgagagaagcatggaggttaaaggaagacatttataggaaacaaaacaaattgggaaagttcatttaactcataaatgtttatttacaagccttcaacatgtaagtaacgatatcgtttctgtccttttccttcttcaaaccaccgaaagccatcttggtacctggaatgtacttctttgggttttccaagtagtcagacatagtttgttcatcccacaagacgttcttcttgatgttagcgtcagtgtaagagtaaccggaagctttaccagagtgtctaccgaagacaccatgcaaatttggaccgaccttgtgtggaccaccggcttcaacggtgtgacattgcaaacatctggtcttgaacaaagtagcacccttcttttcggaacccttcttgtatggagctggcattatgactttatattagttgtgttggttgtgtaacagttatttgatttgacgaatcaatccttaatactgatagtttgggaaactttaattaagatagaaaggagaaaaaagaaaacgctaaaaagacttgctaaagaaacatcaaattcaatcgaatatcaaatcttaatatgttagttatatatgaaattatcaacaaaccatagtgcgcatactaaaatttttctcctacctgtttttaactacttaaaccgaaaaaatgcttcgaaacaagtctatcatttcgggaacatcggtcaagacacgagatgagccaaattctgtgaagcctctgagacttttttctcattggtttcccgttgtgcgttttgctgcagggtaatcttaatggggattaaagcgtggggaaaagcaattcttgtcagaggttggacgtcactgtgaacggaagcgatctgattggttggctgatgtatgttacagtcacgtgatacgtactgaccggcacgtgacaattaacttaatggtaatggttctggaatatctctgatcagtgttaccctgagaagatgatattttttcgctcatattatctgtatttgacatcaatagagtatttatttacttcattctgttctttgcgtgaatatcggtataatgcacacgtgacttttggtgtgctcttcgttagtgccgatacgaaaagcgtgccgtgttgttaatggtaatgcggttaacattgagactgatcaccaagcaggtacttgtgtgttcagtgcttattaaataatatatatatttgaagcgtgaaagttctctgatatctgtttcacccttctcctttcacgttctgggtcttttatgctgcggagaagattcatcatcactactgtcatcccgtggatcgagtagtactggaacatccatggatggaaggattagttctacaattttcaactgatcggatttattgaactctttatcgcttaataaactattcaattccccaaccgacatacatcttctcttgaaatactcttgggaatagaaaagtgacgggagttttaatagttcccacggttggatatcgaagtatgtagcgttcagatgggtcttttctctattcaaggttctgtcaacggtataaccttgattatttattacaaaaatgtaaggtttgaaaccgtgcgtcaatatggtgcttagttcttggaaagtaaattgtaaagacccatcacccaccattaatataatcctatgcttatccaatgtccccatatcgcgatatgctgccaaaattccaaggcatgcaccgatagaataaccagatgaattccaaattgcttgggatactagcctagtattatctgggaatttttgttgtaggagaccaatagctgaggtaccagattcagaaataataacgtcaccttgttttagccatgtagacatcttaaaccaaaggtactcctgtcgcaaaaatgtcaccggttgcggttctactctgggtatcatattcggtattgttactggacgagagtttactattttggtagtatctaatgacgctattagctgtgggagtagttcatgaagtaaaatatcaggtattatattattttcaattttaactctatcattccaaagtaagatttggtttttactcttgtagttgaatctacagtacgagtttttgaagttttcgatcatacatcctaaaattaacgtacaatctgcattattcatatattctcgaacaatgggctgtgacatggtacctaagaaagtcccaacaaagttgggtaagctttcgtcaatagaaccttttgacattaaggttgtcacaaatggtattcctgtttccgttaggaaattttgtattgtgctgttgtaattatatctatcaattaatgcatcaaccacgatcaatggccttgatgaagcgtaaacttcggcaatgattttgtctataaccctctttattgtgtccgtttgaaagaaagtgttctttatgcccatcttatctgctatgtttccgtttagagaactactggggacaagtttcgtggcatccttcgatcggaggcccatataaacagggcgtttcccccaaaaaagcgttcgtacacaactgtctatctcagaaggatcatccactacgtcatgaaagattgaaacatctccaatcaacctctcaagatcatgagactgttccaagacgactacctgtaagatgggaacatattcacaaaatgatccaaaaaaaccattaacatggcctaattctgcagattcgctagtgacgtagcagctcactccgatagctctcccgtatgcatctactgcaaatgatgtgttcaattgatttatcgtttggatccactgtatcccgctggctgctatggcttgatatagtttcgcagttgaataattggcaactccaaacacagtacggcagttgagctgaaataatctatgaaaaagatactcaggcaaaggtattagcggtgcgacattatacctctcagtatagctcatctccttagcagcccctgagtgtatcagggtcttggtttccatctttttgtccgtcccagtatattcctgttaaacttttaattcgacttctcttcaaggaaaatcaattttgtcaagttagttcttgtacaggaaaatgtgacaaagaaaatgcaaagttacacgatggacaaaaggtaacagtagtttttaagtactcaatcgcacgcacgtcatgtggctcttaataggtgagtattgatattattatgaactgacaaggtgaaatccggtatgaaaaaggtaggacggaagctagaaagaaaagtattgctataaaaggaagaattatgatgtccaagtgcccttttcctagtgaggaatagggaatgcttaacataaataaaaagaatccactgcccaatatgaacactattagggacaggatagaactataggttttccgaaagacattgaaatgaactttaaaattgaagagaaatatgatatgcaaagggggggagcgtaggatagcattgaacaacggtgttgcctgcaacaagtaggcatatgagaagtaactatttgtatgcacattaatttcgtgtattaatttcattttctttggatgtgctgggtagaacgttacattaatgcatttgtatttgcatatttccttctctcaactagtctttttttttgtttttagttttccttttgtcttgtcggttctatatcagtttgccagtcaatctatatatatcgttagatgacaacccttgtaattcactttcctcaaaatgtagcaatggtaaagaatcgatcaacgaaaggtttgagtccgacccggtgttgctgacgatatcagtgaagtacgtcgaattgaacatacattgtaaagcgctgtatctgatattaggatcatatttcatgatatggtataataagtctatagtttcctgtgtttccttcttgaagatcctattcaatgggatcggtctgatctgagggaacttatgttcggagtagttttcattcatggaacagatctcttccctggttggtgtacccaaaactttaataatttcaaccaattgatcgatcttagattcaccagggaaaatgggttgtcctaatagcagttcagccataacacaacctgcagaccaaatatcaatctttgttgtgtaattggtagcaccaaagatcaactctggggctctgtagtaacgggagcaaatatatgacacattgggctcgtttggtttcaactgtttagcagaccccaaatcacagattttcaacagtaaagtatctggatccaccaaaatattctgtggtttgatgtctctatggcagacattgaccacttgatgcaaatagtttaaagatttgaacaattggaacatgtaaatcttgatttcgtaacgatccattggttgatgcaaggaaatgaactctttgagccgttgataaagagacatgggcatgtaatctacaatcaaatttagataaagttcttggtccgattgttcaaggaaatagtacttcaaatcgatcaaattcggatgactgatcaatttcatgatctccagttctctattcttaaaccgtctatcctgtagaaccttcttaatgacaacatcctccccagtctctttcacttttgttctgaaaacgacaccaaacgaaccatttcccacaatttcaggtgtgccgcatgaaataacaactgactcctcggggttggaatggcctttcaccacagtccttcgggttattacttcgtcttcatctggaacgattttaacatcattaccatgactgttcttactatgaagactgccttgttttaaatcatcactgggtaaaatggaatccatctctgtctcaaaaccagcgtttttatcgttagtatatgcaataatagatcttgaaccaccggcaccgctactttcgagcaattcaccaactttcattcaaaaaaaaaaaggagtattgtactaaaactatgctgacatgcacacttttctctgaatcctttctctctcacaacagataagaagtgattgatctgtctgtgtgtgttaattgttatatgcgaagtcttgttcttggtgttcttttttttttaccttaaatttcaccaaattttccaaaaacttcaaacacgcaacgtcttctaagaccagtaaaataaaatattcagcacacgcactcacaaacacacgcgcacaccgattcaaaatattatgcgggggggagagaatcaggttaaaaacaacagttttatcgtctttcttgtctggctcaatgaaaaattttccaatgtcctcatgtctttctcaaagttttattcagacaataaatactaagcggaaagagtaaactaaaactgcttgcaaattgctttgttagtccagacatttattgtatcgaatcagcttactggaaaattgaaggagagagaaatcgaaatagtttttttttttttgcctgaaagcatgactgggttgagagccttcccttgtatatgcgtagaaagcaagaaaagtgttttgtctgacagaataatctaggaactgactagccagactactgaacagtttgccccttcgtagtattacttaataggaagaagattgcttgttcaaatagtatagtttttcctggaaccggatgccagggaaaagtggaagttcgtgagtacttctccgttagtccgatcacatccaggaaaccaagcagggaagccactcaggggccacctaggcagggatcaaggacaaatggagcaaagggtgccgatagggaaagggggtcggaaaaaaagttccaaattgaaaattgtatacatacttgttacccgacgtgatggggcggcgttattgccggtaatttgtttgtggggcggaacggtagacgaagctttggatgtcacgtgtttagcatttttgtcagaggaagccgttgttgtcgatgaagacgacggtgatgaaatgtcagacgcaacgatggattccatcgctacatcatgtaccaatttcagttcgtcttccaaactgagctgtttcacaacgagctcgacatcgagctcttctgtgtatctgtcatgacaaggtagtgcaccggcagctttatccttgctcttgctcttggccttgccgttctgtccagttttcttgtcgacaacaactggtacttcggctaccacttgtggaccagacttgcgtctggtccacgtgatgccctcaggattgtatgttggatgaatcttatctctaatctttttgaacatctttcgtctgtattgctggtggttacgactggtcggggtatggcttttctcgttcttggtgaagtcatctaaacgatggagtttatcaacctctggtgttatatacgcgtgaattatttacacaaatttttcatcactactgtaaattcatttatcagacacaaatgtcgtgcaagtaatatgtcaactgtggtttgtgctgcttgcttctcgtaatcgctttccactctgtgcattaaggttcttaagaaatgaaaaaaaaagctggagatatgggggagaatgtccaatgtccctctgttacccggccagctgacgcaatcaggcgcaaagtcatccggtgagtaaaacgtaggtttctagccaggtcgaatctagattattcaaatttgcatagcataagcattcattgcctatagagtggtgttacttaacttacctactatatggatataaagacttgaagtgtaggttgtttgtgcacaccccttacacttacaacttggtttgcttcgagaaagctagacccttcttgatgttcttttctaagattggcaagcacttggcgatcaacttcttttcgtcatcgttcaacttatcgacccattcgtgttctacagcgacaacgatacctttctctaatttcactggagcagagaagaattcaacagaagtatttaacttcttttgtaattccttaccacctggcaaaccaggtaagtaaacgaaagttgggattggatgttggtcaccagcggtgttcaaatgcaaactgttcaacaatttcttagcaaatgtgtaaccggcccaagccatggacaaagtagcactaccgctaccgtccttggccttcacaacttcatcaccaccaaactgaaccctgtgtacgtaagattcgtaaacgttggagtctcttaaacgtctgtagaatttttggtcagtaaagattggaatgatggtctcaccagaatgaccaccaaccacggtaactgcatccttcaatttttcaacggagtaagctttacggccaatgatgtctactaggaaagtgtgagatctgatgatatccaaagtagtgatacccataaccttaccggcttggaacttgcccatgctttgcaaagtttcgtaaacaattggaaccaacgagttcactgggtttgaaatgacaaggattctggcatctggtgcatgttcagcaatttgcacagttagagacttgatgatcttggcgttgatcttgaacaagtcgtcacgtgacatacctggcttccttggaataccggccgggattatgaccaattgggcacctttcaacgcttgaccaatctctgcggtattgaaaccttcagacgtggagttagtgtcgatatgagacaaatcggtagcattaccgtgggacagcttcaaatcgtacaatctcaaacttgatacatgagggtctagtttcaacaacaacgaaagtggttgaccaataccaccagatgagccaagaactgtaacacttaccatgactgcttgaaaacttgactattactttaccggttctacctatttgaactgatagtatccctgaaatcagaagaagaaagagatgatgatatttatatcaataagtgctgaaagtctctttcaacaaaatatcctaactctagggtatgtggacaatcccagaaaatcgctatgtatatatatatatatatatattcccgtaaatgtatatccaaatagttaccaattaactagtgattttccggtacttttctacttctaattcaaactggctttgtcaaaaggtagacttttttttttttcaattggcatttttccttatttccaggtcgccccgagtacgtaaagttagagaggagaacagagtcattgtgagatggctagatattggggcagttagtcaggcagggcttttaatgtatgaaaagtaagacttggactgataaatatgagtcgttattacaaagcgatccatctacgtaactacaagtcacttgttttcaaccagaagcgcgcgcaagggaagagccactgactctcttcatgagttctattcgtccattttggctcaacgagctttttatccgtagtgttccgatttcttccgatgtataagggccaaattcatgctctgtatgcatcacgtgacttcccggagttatctcatgtgaaactttagattttctggtctcctttagggatgattccactgacgtaccgcgagctcccttcatttgtcctctagtaacgttattagctggtccaatccagttccattcaccccgcttgtaggtattacccgcacactttctggatccatctgtagggtacgtgatgttatcattttcacgtgatctactttcttctgtaaggtatcgtcatcattaaggccgttaccattacccttcggaagtaggtcaatcttatttaataggatgaatacctcgaattgtaagttgattctgtcattctcttgtacaatctcttctaataaggttaaactctccatgagtctgttatccaagatatctattacccatatcaagtaatcggttttctcgaaatagttaaaccagaatggccttaatgtcttctgaccgccgatatcccacatctgtagaaccttgttgcttagtttcaaagtcttgatttggaatcctatcgtgggctggatcttatctataggttcattcaatagctgatttaggactgtagtcttcccgctgttatccaacccgagcaatagtactcttcgtgaattgtctttcaacttctgttctttgataatttgtagcaggcccattttgttatgtgctccctctcgtatactagtgttctggctggtgattgtcagccatttcctattcaccttaacagctcatgcacgatttctcgagcaaagtatatatgttttctttttcgattttcctagtgtagctatttataacgtttatcttttttgcaattatactcatcgcacattatcctaagagagttcaatttgcaaccaccgtcatctgtggcctctacttccaaagcatcgcgcccgactatcaagatgcctaagatatgaaacgagttacgaaaagagttcaaagaactcagtctcgtactttgttcgatttgaagttcgttcgtctgaaaacgtccgttgctaccagtaccacaagtaacgaaattatagacttaactcaggaagatgaatatgatggtactgatacagattatgttactgcagacttcaccagttgtttagaaagagaggctagcgtcgatcctgaaactccagttgctgggggcagtcaagacgttaaaattgagggaaagatatcacaggcacaagaagttgaagttcaagtccaggttcacggacaggcccaacctaaatctgagccagctgttgtagataaaacttctcggaaaaagtccatggcatggttcaaaaaattaagtttcagcgatataactgttgtggttgattcttttaattgtgataaagaaccaaatatcgatttatattttctttcccacttccatgcagaccattatggtgggttgaaaaagagttggtctcatgggactaccatctacacttcagtttacactgcgaatttagtcaagtggaagttcaaggttaaccaatgcaaacttattggattgtctttgaatgagtggcatagcgtctcaaatgaagtgcgtgtcatattgctagatgcaaatcactgcccaggctcagtcatatttttatttcacgatctacgaagaaacagttttgtgttacatacgggggatttcagagccaatgaacggatcattactgaagtaaattcccttcttcaaggaaattccttgtcgcttatttatttggatacgacttacttgaatccattcttcaagttccccgctttacctaaagtatgtgaggtaactgctgatttcgcttcgctattagcagaaaatgggttgaacactttcctaaaccgttctgatagccaaaggtcaatttctcaatatttaggattatctcagaccaaaccaatcctttttgttgtgctaagttattcaatcgggaaggagcacttggctatttccattgccaagaaattaaaaacacaactctatgtaccgcatacaaaatatcagctggtgaaacaatacatctcatggtttccagagggtctactcaccactgaccataagtcatccaatgttcacttggttgctatgcacacagatttggataaatatctttctcagttgtccaatatgttcgattctatagtggtatttcgacccactggctggactttttcaaaccaatatgataagtcatatacactttgggatgaatttgaaaggaaaaactgggttaaggacacattgtcgggagagacaccatttgccattgattatttcaccaaacaaaaacgttcgcagggcaaaatctaccatttcaacgtcccgtattccgaacattcttcatttaaggacttatgtctgttttcaacaaaacttaagtgggataagattattcctactgtgaacctttctcaatatagagaaatggcacgatggttcgaaatatggaaatcatacaaaggatctcaataaacaatggcatataatcctcattgttacattaaactacttattattttaataaaaattagtctgtccgccatgagaatgaaaaaaatgttaaacaaaatatccttttactattattacagttttaaatgtcttcgttgacaatttcactcaggcgttgtctttgatttaatattgaaattatcatcaaggttatcattattctctaatgattctataaaagaacgaggaacgttcaagctttcaggaactcttctgtcctctggacccttcatctttctgtaatgcatgagaatgttagcatcctttgtattgaattttctgattaacttgcagtagaacaatccacatgcattacacaaggtcctattaccgtaaggcccccttctccattcgggagtaacggtttcatgacagtgtttacatgactcggtaccatctcctgccgctacgctaatcattcgttgctgctgtgaaacgctgttgcgtttccttggtttgactttatctactttaaaagtatgacttgttcctccgatggaactatcgcttttactgcctctatgtccaacaacttgaatgaccggcttttccatcttagtgttggtagctgcggttgggatttctacttcagattttcttactgtgacgttgaaaacatttttactcctgggtctcattgggaattgaaactctgtcattggcttttgtagctcgtttctaagctgattaatactagggagttgcggttttttcctgttccaatcgttcatgttcttcaactctaacaacctattcgtaacctttaacatagatcttgtttcgttggaaagttgggtgagatcattgaccaaaacatccttaatcttctgggaactccatgtcagcaaatgaaatgtcaactgttcattgtactctgatagtcttttcaaaatccgtttgaattcttcttgattcatatcctggtcgatcgcagtgtcagccaaaaaatcaagggatccacttctatagtgaccaccgtaatggtagtccctttgacgaggactaatttgcggtgacgaatttgacgacgaaagaaaatttcctgtcgttgaaacggtaatgtttgtttgtgacgtcttgtttgtccgaatactcgaatcgttctgcctgtcgtagttcaatagatttgggatggaagcaacactatggtagctgacactttgggataatgattgaggtgttctcgatgtaggagttgcagatgatgaaatagaaccagatttgggactttgggaccccttttgtgccagcgacgctgtcatagtttccatgaatgtcataataacaattatactgactagccgtatgtctatttatgtgtatgtgtgataagcaatgttgaacgaatatattattcaaaatgatatcgactgtgtcttggcaaaaaaatttggtttggctctgtggttctattttgttatttcaattgaatgataatgagattgcaatctaacgagttacctctctgttagtttcgaatctactcttggccttaaatacctggcttatttgatgttcgaagaactcggaaaagtacgcatatatttatatcatttcatttttgtatagatcatttcagttccttaatttgatttgacacttttttgtcatcagaatctaagtaagtttcaatttagaatatagaaacggcttggattgcctcctccatttcattattgatcctaaaccaatgaatattgaaactgtaaagtttttaaatctgtgttatgccctcgatatgtctactgttttgtatattactacgtaaaatgtcgactatagctgctatgagtgacatctcatgaatcgtttccctctacttgaaagatacaaaaaaaagagtccagattcaagaagatttaaattgagaagtttctcgattactgttatctgaagctacaaaccacgatttgatatctacatgaactccttttcttttcagaattgatctgtcccatttcctcgtcgtcagaggcctgttcccttatttattcacaaaggtttttcacgaaatgaaccttaacatcacttagtaaagaaactgggcattatcaacagaaaaacaaaaaaatgagcacctaattgtaagttgaaagtgagacttccttagcccctaatattgaaagaaagagtggtactatactatttgcgctaagcataagccaatctagttttccctagacttattgcttcatacaaacgatgaccaattttaaatctacctatgagaagaaatctttcactagagaacaatggatgaaagtggtgcaggacgccaatccctatgatcgcagcaacagtgagttgtcgaataatgagccggtaataccaatgttattattgaactattttgtggtgatggcatatgaggaatctagtatccgcatggctaaggagcttgggtttttgaattccaacaaagacattgaagaattcaactctgtatatatgattaagaaaagggcatacatcaaggaacttatcaagaagggtgaaattttactagctatggaaaagattaccgaggtatttggaatagaggtactcgaaagtttgaatgaccatattacagatgaagatttgaacttcaagctattgttgttgaaccttattgaaatgattcgttcccacaacgccaagggcgaccctaacgatcaggagcagtttatattagagcttatctcttatgctcaggataaacttgctttgaaagcaagctccaaaaaagagtatatgaaggaagtcgaattagttatgacccttcttctcttcccgttatcggatgaggatggttcgagtccttctgctaagttaccaaagaagttgaaacagctatattccttaaatatgagaactaaagtagctgatctagtgaacagaaagcttttgcaatcgatattaccgaggataaactctcaactcgaaaaatctggtttacctgacatcttaggatccagcttccaatcaaatcgagttcccactctaacaaacgttatacgatccattccaagggaatctatcacgacagaaaggcttaccggagagctagcacatattgaagaaaagcagggaagttctatgagcaccaattccgacatgagtcgcatacaaggtgaaatctttgaagagttaggtgagaacttgcattcttattatatccctaacgacgttagattggtacaaatcatgaaactttgggtttggtgtgaaaaccaattgcatagttcggatgttggtgttccgagggttgaaggagtgatttagtgcaaaatctataatcttttatactatatatgcatgggttccctatattcacattatgttttcaagcatttaacggcagcttgcaattttcacaccaaaaactcacagtctatagtgtcaccagtttccatctttaagaaacacaattgaatatcgtcgaggttttttggaagttcctcgctcatggtgttgtagatttttacatttttggtaatggtgaaggttttgcttggctgtttgaactgatcataaaagtgaccatctttaaagaagtgataaagttttgattttaatagccttaatgtacaaccaaactctggtcttttttcattttcgaattcttctggtgagaattcaatgtggaatgtgattggattatccaacagaagctttttggtatcttcgtcgataacttggcatctaacgtatatgtgagcgacatgcacaggtttggcaaagaacttttccctcgattcgaactcctcgattatgagaccggatttttcatcaaaccattctgtggcatggtacgaatcgtcatgtatgaatcgatggtttctaataaaatcttcgtccaatttagtgctgttcaattgttcccatgtatccatttgtaaggcactcatttgaattgttatgtagagttcattcacaagagcaaatcctcccatcaccacaagaaaaagtgttattcgggcacttagcgggtcatcagtgtattgtttaagaaagtttacttttctgatccaagcgatcataatgctttccaattgcaaatagtgacgcagcaccgtcgcgcgtaattcctccatattggccttttcaggtcttataaagttatattagtttgcaggtcacctttattagctcgcactagtccacttcaagtgatttctatatctttacgttttattgcatttgaaggtgtgtagtttcttctaagtttatcgatttacaaagcttgtttttcatgccccgacgttaaacgagaacaacatacatatcgagaatgcacatacattcttcaaacaattcatgtggccagcttctgtagcgaccggaaactgactctagttaaatggtaggtatgcttttggattactctgatatatctaaccttaaactcctgactctaaattctaactgttataaaagaactcgtcttacaatcattaggctcaagcaggcaataggataacgtcatttaaaatatcctctgacatttgcatacttctatttatcggtcaaatatccagtttatcaattcataatggtctgaactacattcatgctccatttttttatgttacagcagcttgtctgcttcttacgatgaaagagttcctgctctccggtctttgtattctacagtcttcgttcctgatatctcctgtttagatctgtgaatggcaattcctatttcgtaattatttgacattaccatttgtagaaaggttagtgtttaatactcttgactggcttgcccctgattatgagatcggttgcacaacacaaaatagtcggcattgttactggaaagtctttcacaaaagggcccagccataagatgcctaacctcaaatctacaatttctgagcaatgaaagccaaatgtatcatattcggcacatcatcatatttagcagctagcttttagaggttcatcatgtcacagatatcttcatcatatattgccgaaaaaggaaacccgccgacagtatatataaagtcaggccatacaggcgtaacaataatgtaagtcgactcgctggtatcaattaccaaccaaaaaagtatccacgttaacagatatataatggtaagacttagcccaattttaattctagctacaatcgacgcattcctgtgtttagccgcagatgaaccatcacctgaacaattaagttcagccaaacaagaagctgcagctgctgacttgcagttcttcatcgaattcttagatgattttaacgtgaacctggtctcatatacatcatatatgaatgaagcaaaaatgacattgccgcaggatgttgccaattattactatcatttgaaaagtgtaactgaaaccactcaattgcttgatgatttagccaccagcttcccattcactgagttcaagacttttatcacagcttttccttggtattcctctatattatctgaggcgtctgcaacagatttctatgtgcctgatgattttattacccagcaagcggaagtaccagtaacttcctctatcgctccatcgactggacaggtaacacaacctcctgcaaccacagcctcttctttagagggtttaactaccgatctccccagtaacgcatcttccactattgtctccaatgtatccaccacaactgtgacagccttccaaagtgtaaatctaggctcaaaggctgataagtatgtccctctgttgatattggcgattttatgttacttgttttgataactcatcttttataagatcttcaattttttcgacctgacacaaacattattaccgttgttagtattctttagttcacttgttgttttctgatcggacttgatatttaaattcgataaataatcttcaataacatacccatttcatgaattcaggatccgcaagtttggatttaatttgacatactgtaggaacttcaagggttaactttgacgttggattttccagtttcaattcacccttatagtttttttctttggtgatgtcgttattctgttcctgttctttctcgatggaaggttcaggcgtctgttgagtgacgagattttgcatctgctcattaaacaaaggaactctcggtgctggtagtggagtactctgagataaaacaaaatccatgttggtggctgtttgaaggaagctctgttgtgaattttgccaatgcggatttttcacctgatgttgattgtaaaactgataattagctgaacaaacctgttgttcaggaggaaacgctgctgtttgatttgggttaaagaaaaaagattgcgatggtgataggacggtattgctccttgttgttactgctggcttcactacaaaccctagtttttgaaggatatcggttgcttgcacaaaatcaactccgttgtgaaatcctagttgaaatcttttcatcacaatagtattatcatctttctttatgagatatttgcacgatattgacggtgctttagctgaaaattgaaaaggttcatgattaaacccggcaaaggtactcttcaacgcaaagaaatctattacttctaaatcctgtaagtacggctgtgtcactactctcataaggagtttatttgggctcgtattcgaaaacattaagttgatcctaccatctgaagatacgtgattccatttatctaccaatgttggcgtctttccgctatcgaatccacttggtgctgcttctaaagtggtgtagtaagaatattttctaatgggaatactaaattctgccattttccttgttctgtattttaaccgccgaaggtcctttgtatcaataatacatccaaagtaatgttccacagatattatttttacagagaaagaagaataataaatgattgttcaggagtcagttttagggttttggtaaatcctgggtacttactctctgatgtgtatgtcgtcagttgttctttcgtgaacatgggtcactgaacttattagaggaagtaatcttaaaaaatgaaccggtgttttgttgttgttttttttttaatgatttccaggaacttgaagtttgacagaaactgacgaacagttaattcctgtaatccaaataaacaagccaactgcagatcaagttcccatttcacattcagctattttgtgcactatcaatagaatcagtttctgccacgccatacctcattgatataaaatcgaagcttacatttagagaaagaaggatggtgtatttctatacttcacagcaggttgacggtatgagtccgcattggatcattacaggaaaggataagtttgaaaacgacttattgataaagtacgggtacagggagttacgataccaatggtttcatgccgataagtactccagtgggcacatttatttgaagttaaaacctgatgagaagacactgcaggatgtacctcgagaagtacttcaggactgtttgcaattgtgtaagtcagaatccattcagggaaacaagctgccgcagtgtactattttatccacgccatggcataatctgcggaaaagcgggtacatgaagcctggtgaagtttcctataagtcaacgaaagctgttcgtaaaatggactgttttgctagagataatacgatattgaatagattacagaagacaagaattgaaattattgacgaaatagaatcgcttttgcatgaggcaaagaaatcaaaagatccagatttctttgctagatatattgaaatcaacagagagaggctaatacaagaggaaactcagaggaaagccttgaagaaacagaaaaagaagctaaagaaaaaagatgaaggacaattatttgagtatgaaaacattgaggtgttgtgaaatagtttttaagataagccaaccgcagcccacccttgataggtacattgcctatttagtatacctttcacaactgacacatggaagaacatatttacgtatcacgtgaccacatgatttctttttccaatattgaaaattttattgaaacgatgcgatgagatgatcaaacactacatagtaaggaatctataagtaagttatgtaccagtattgatctattggcaaaagttgctggccttgattgaatcagtgacaaactgtacttcaatagaacaattccaggatgtccaagagaactgcttccgatgaaggactagaaaacgtcgatgatcgaattgtccattctaagacagaggctggtgaagtaccatcggccaatgcagtgaatgccaatgagcaagatgttgaaatgggtgaattcgaggacccttatggtgatgatttcgagagtgatggcgaaatcatcgaaattgacgatgaagaagataatgaagaagaattagatggaaacattgagaacgatgagtttctggaaaagaagcaacaacaagctcaagagctagtcgaaaaggatcaaaatgctgaacaagagcaaagtgaacaattgtggttgccacatttatctaagcctttgggtcctgatgaagttttggaagctgatcctacagtctacgaaatgttacatacagttaacgttccttggccatgtatgacgcttgacgttattccagacacactaggatccggccgcagaaattatccacaatctcttttgatggcaacagcaacacaagcttctaaaaagaaccaaaacgaattgatggttttgaagatgtcccaattggctaaaactttagtaaaggaagacgaagatgagaacgaaggtgaagatgaggatgaggatggcacggaccctgtcattgagaatgaaaacatttcccttaaggacactaccaatagattgaaagtgtctccttttgccaatgcagctcaagaggtattgtgtagcactatgtctgaaaatggggaagtatatatttttgatctggcttctcaggtgaaagcctttgagactcctggataccaaatcccaaagcaagccaaaagacccatccatactgtaagaaatcatgggagtgtcgaaggttacgctaatgattggtctccaattataaaaactggtgcaatgctatcgggtgattgctctggccaagtcttcttaactcaaagacatacttccaagtggattactgataaacaagcctttacggttgctaataataaatctatcgaagacttgcaatggtctcgtacagaatcgactgtattcgcttcgtgtggtattgacggatatatcagaatttgggacactcgttctaaaaaacacaagccagccatttcggttaaggcgtcaaatacagatgtaaatgttataagttggagtgagaagattggatacctacttgctagtggtgatgatgacggtacttggggtgtatgggatttaagacagtttactccacaaaatgcatccactgcctccccagtggcacagtatcaattccacaaaggtgcaattacttcaattagtttcaatccactcgatgaatctataattgctgtcgcatccgaagacaacaccgttactctatgggatttgtctgttgaagctgatgatgaagaaattaagcaacaagctgctgaaactaaagaattacaacaaattcctccccaattgttattcgtacattggcaaaaggaagttaaggatgtaaaatggcataaacaaattcctggctgtttggtaagtacaggaactgatgggttaaacgtctggaaaaccatcagtgtgtaataaactccgtttttattattattatttacaaattaaatcctcttaatctttactcgctcgcatgtaagttaataaaacagataaaatggacaaattttctcctctcgactacatttggagttgatgtgactcatcgtttagaacacttcatttattcttttagttactgttgtatgtctttattcacaatttggtaatagcttaaatagtagtcgaaatcaaagatacgaaaaaacatcatgatctacagttttcattctttatgttgaaggataaacaggacatgaaggtaaggggcaattgaggctaaacagaagacttatagacgatgatgctcccagtaaaaccaccgcaatcatttcaacttcccggacgttgtatagagggtatcgatgaggatatcattcaaacaattgaggcacctaattcaaaccacttcctttttattacaaagacaagactttttgtttaccaagccaaaccctttgctccattagcatgtcacgaacgtactgctgagtctattgaactgtttggtgtcaattttggtattagagataatttacctcttggcactgaggtaaagggtttccttacaggccaattttgcgatccagtaatagatgataagcggttctactatgttataaccaagaacaactttctgttggtttacgaattatacaccaaaacatctgaaaatagcgtgttcaaagaatatggcataccgttaaacttgccgtcagatgattctttacttcatagagctcttgatgatgatatggatgatgaggtattgacagttttttctgctaaggaaaatcataaggttatacagaacggttatacaatctccaaacaaaaaggcttcttgcagtttatgaaaaatgatgatatagctgaagagttaccgattcgcaggacggaattgaaattaaacgtggtgctaaaatttgaccatcaaattttcgatgttattggtataattacgcatgatatagagcgtactgagcatgctaatcaatacctcttggtactttttgaacatgggctgcaagtattgaagcttgaggacttcaagctaattgacaataagctaatacatgtaattaacggtaaaaagctaatttactgtgctggtgaaattttagtgttatcttacgatgagcagcaactatctctagagcatatccttttcgatcaggaaaatgtgaaatctcaaaatatagcattgaagggcccatccggtgtttttaaagatttagtaatgtttgaccatttgcttgtagttgcgtttgagaaatgtaccatttactacgacgtctttgataagattttagtcagtgaatatccggccataacacacgtttcttgcatttcagccatttctcccgatactatggtattgttgaccgaaaacaactcagttatctttatgagtaagtggggaaatatattattatcaatcccaatcgatgagagccaattcaaaatcctgcattgctcgcttatagataccaagctattaataagtggatcgaatggtactctacagctttgggatctttggaaaaagttagacagttctctctccaatttcagaacaagtcaagtcttcactttactcaatgataacaatgatatactactttactctcctatgagtgattccacaaatacgagcacttttcaaacaattaagttaccgactaaaacagttaacaacaacattagtacctgtaagacaaatgggattttgacgttaatggcagtgtatgtaggtaacaaagatattttgctcatcaatttcttgaactccaacacatggataagttttgaccaaatgaatatcaagaatatcgattggcttggggacgactatttgctatgccatgtcacagatgaggattctgataaagaaatggtaaagtgctaccatttcccattactgaatgatggatcgacgaatcttgaagatttcaagacttgggaatgggaggtacctcaaggctaccagttggataatttctatgcgaacactttgtcgacatacaagatgttaaaattcactgatgaaagggaggacagagatgatgccagcaaaaaggtgtttgttacatcggagatactgatggttctttcgaattcgcatatgatcatattcgatgcactaagttcggtacatccaactggagttaacatggttcagaaatttcatcagtatgcagagtataatttcccagaaaattccttacgcggtttaaaatggatatacagatataaagaagggtttattgcatggattcgagatcaattggtaattattggccaacaagaggataagcaatggcgattccaagtagcatacgatcgggtggaacagatcttggagatatatgaggacaatcttgtactacttagtggcaacgaagtattattatacgattttgctcacatatggaccgtcgatgatcccctaatcactacaccggtcatcgaagaagagtatccgatttcaatttcattagatacagcaacgctgcataatatttcatgcattacaacacaaaagttaacgaaactctcaatatcacacggtgtgtacttagataagattgtggaccggaacttgacactaggcgtggaaggcgataaaattgatgagaagtatcatgatttgaagcactacaaattttgtttggaaaaaattctatccagtaaagtattggaacatgaggacttgaactccatattatcattaatcgatacctatgataaaaattcaggcgggattaagaatgaagttggtaaacttgaaatcgtagggaattgtttaagaaagatcgaaacaaaacattgggactacttatttgagaatctaaaactaactccaagagatcttatcaccaagtgcattgctctatctgaagcgaagatcttgggtacgcttttgatggtattcttaaactatgacgagggcgatagtgaatctaaacaggaagaggtcacgacaaagtccacaaaacgaaagaacaagaacaacaagaacaagaacaacaaaaacaagaacaagaacaagaacaaggaaaagagccatacaaacggactcaaggaatctgatagtagagagacttctccagatactagtgtatccaccatcctaaaagacgaaacagtcataggtcaagtcctcaagatattcgtatccactgccactctttcaactacaaaagagcaagcacaagagtattgggatttcgctctacaactaattcgattcttaagagcactagacagtaagggaaatactacactagcacagacttgtctggacatgatctaattaatactgggaaataccttttttctaaccgcacttgtcacgtgatactcggccaatcacaaggactgcatcgtcaaagacgattacattcaaaccccatataaaatatgtatgctcacactattcaaatcaaacatctcgtgccataataagaagatgatgcgttttcttgctgaatggaaaagtgttaccatcatatactgcgattttttcgcaattaaccaggtattttacagttacgcttttaattgaacgaagcatatgtactcctttctctggtactacacagctgtatactagggtagatgtaatattcaattgaccccttttacgctggatatatactagtaatattactattaaagtctatgtctgcggagtatctgtttgtgctacctcttcttaatgttacgatatttcatcttttttttttttttcattcctaatgaaattttcgaatgatattttcatagtttttcttgaagccgaaaaaaagattttgattattctaactttctatttagtttaactgattagtttttagaattaaaataaagaagtttaagaactattcttttcaattcttgttgttatttttgttttgagttttagttttagattagtttgagatttgtttgttcattcttattcaaagatattttagttttgtattgattttgttcaggttaattaagatcactctttgttcaaacatcatcaccgataaaccctattacaatggctgaaaatcaagaatctccattacacaccgttggtttcgacgctagattcccaaaccaaaaccaaacaaagcactgctggcaatcgtacgtggattaccacaagtgtatcaatgctaagggtgaagacttcgctccatgcaaggttttctggaagacctactcctctctatgtccagttgactgggttgaaaagtgggatgaacaaagatcccagggtatctttgctggtgacattaacccataaactggttggaaatatgtgatataatgcgatgaaaaaagaggcagttaattagtgaagaactagtttaggaaaactaaaaacaaaaaaagatgatattcatttggagcaagatgtgacaacagatactgaaattatctgttatgattcgtacttaacgtatcttcctcttttattattttcattcactttcctcgaacaatggcttcactgttttctgtcccatcgatttttcattcattttctttttaaaacaatatatttattatcccattcacatccgtcctccgtttcccctttcgatgttattgtcactttgtaacgttttccactcaatataagtttcagcgtcttggatcatcattccagaccttagtgtggaaattaagtaacattgatggagatccggaaatcccagtacaagtttcacttttattaaaacaatactctcataaaaaaaatttacaaagaaagatcaatttagaacacagtttaaactttgttacgtacccacacatcaaaacagtgatgaaaatacattctaatatcattcaggagccaaatacatatatttacttatattattttttttttaaaatccaagtcctattatatttcagtactgttctacatccagataccgttacaacggatacgccattcttcgagctccattaacctgtagctagaaaagcacgaatcatgtttcgttgtgtttggcattacagagaatttgacaaatctcggaaactaataatttgatactgaagacatgagcatgctatggcagtagatgatgctcatcaaatgtatatacctgatagtcttgactaacaatcgtgtcggggcaaatggcgcagttggtagcgcgcttcccttgcaaggaagaggtcatcggttcgactccggttttgtccacttattttttttccaatccaaaacctgacagtagcatgggtacgcaaggtggaatttaagagagggatagtccatcatacagagtgtcgtttgctcaatcaaatatttacagcactatatcttaagatgccgctactgctgaaataatagggcctccaatgatttaaaatttggtaaaacatactgtctgctgtttaattgtactacatcagtgactgcatcagattcttgtaatataacctctgaatggtgtaacactttcctcagagataaatcatcttctgataactcctttttgcaaacatcaggagttgttatgtcgaagtaaccgaatgagtttgatctatctacaagaattccatttactccagcttggaaagctcctcccagatccgttttctcctcatcaccaacatgccagacgtgtggccgaatattttccaagttctcacgttgaccactagtgttgtggcgtttcaacatatgagagaccgcgtaattaaacatagccgggtcgggtttttttatctcaagatcataagacagatagatatttccgtcgaaatatttcttaagatctaaattctctaacaacgtaaggacaatggggtcagtattactgacgatccccaaagaaacctcaggatggttcctcctcattgtctccaaaaattccctgacgtctgggtataccgtataggcagcatcgccctcgaacctttctaagatttcttctaccatttcatttggtatctgtattggttcaaacatatccctaattagatactcccaccattgttcagccgtgataccagaatttttaccatataaaggatactttttacggatattactgaaaacccctggaaatctcttagtgagttcttgtggattaccattaatcccgtacttggcacccactatacaatactgttccattacaggttttttgatggaataaagagtattatatgcatcaaacgttatgatttttggccgcgagtgctgcaaactgccatttttgagtacctctctaggaattcttaccggtaccatatttccccggttagattaacgttacttgacttcaatctactactctgaaatcgagagcttttctatgttttatttcttttaatggttcaacttggtatacatttttcagaaaaagcttggtcgaatgtactctgaagttcatcaacttagatctgacatataaatacagaaagcagatatacaataaaaagatgccttaaaaaggagtagagattctgcccagggataaatattgtaaagtcgctgtatgaataataggtttcattgttggctgtttgaaaatagcacttcaacaaaccgtgttattgataatcctgtctcggcggttaaacagctgatagagaattcgatagacgccaattgtactaaagtgctgatcaaaatagatgaatctagcggcggatgtaggtacatccaattgaatgatgatggtaacggaataagtgtccagaagcgcagcagcgtttttgttaaacacttcaaaactgacggtaaatcatgcaaaagaatagggtacaaaggaagagcgttatataatattggcaaaacagcatcgaagaagggatctatcgaggtgataacacggactatttcagagaatgttgctgttaaatggtcaccacctagaatcagaataaatgaaactattagattttccaaggtagtgaatccaccgggtacgacagttattctcagagacctaatgacgggaagtaaaagcagtagactggcaaagaaagataaaaattatattaaaatgattagggatatgctttttcatttttctttgattcataagcatatatgttttagttgccagcttgtcaatcctctaagggacggaagtatcaagactttagaatatgttgcgcggtttggtaaatatgaagaccggatgtcgcaattcaaaaaacatgttaccaaacagaatcttatagttgagttcgaacactttgatgagatagagctaagtgaatctctaaaagttaatatcatattgcccaaaattcgaacacatggcagagtgacagaattgatgccgaatcttaaatatccttgcattaatggagaagcagtaatggtacaatcaggctttggtaaaaaagtcaatcattttttcaaggaattttataagcatttcgggaaaccagaaccgagggcatggttcattcaatttttatgccaccatactagcgacaatgctgtagtcaatggcgaaaataaagctgtcgcacttacactggaaaaagctctatctattttgcaatgttcactgctcaccttctacgctccacacatgcagtataatgatccttcaaattctacccatattgatagtgaatcagtgattttcactcgtagaataattaatacaagtgacattccaaagcaaattcaccggcaaataaccaataaccctactcaacaaattctcgagaaggaatctgaatggttgacagacatgtatagcggcacgctatccgatggtagatcttcaccagtaagggaaaaccttctatattctgacattgtgaacaccgaggattgctgcattgagcgagatcttgaagacgtagagctatccagaaatacgactctttcaaatccatttattctttctcggatccgtgccaggaacactacagagatagttgacgatcaaattaaaagttcgggcatactagaaacatactatcagaggcagacgcaatcttctgagttttttcaagaaccaacaagcaagagaagaagaattttggaaaatgatccagaatatgaccattcaacaacccttgttgatattgagcatacagcaaccaacagctctactaaaaacctcgacttacagtttgaacatactttcaatctcggatgtcgcaaagctgtcggccgaagcgttccatggaagcttcgtttcttgaaaaatgcctataagaaggaattggtctggttccacaggagcggcatgccctcattacctttattggatggaatacaaacgctaatggaaggcgaagatagtgatgtagatttacagctaattcttatgccaacaggttggtttatgatagccctatagttcaccactttgaaggatcaaatgagttttaagatggttatttattatacaatgaaatcaaatttcaatccaacaacgcacgattcttagctgcgcagaaggcgtctgacacttctaaagcttcatatgtaccttgtagactggtcacaactctgtactcgtaagtatagatatcggaaactttgtgtgtttcaacaatttgttgctttctgccctttttggtgccagagttttcagtacggacgtaggttaatgcgaaaggaggtgtaccttcgaaggagaatataacttcagctttgtcaccttcatgaatatcttcaacaatctcttggccttgtgatactgttaccgacggaattggatgtatattcaaagataacctttcaaagtcttgtttcatcttcggatttgtgaaatctactacacattgtgatgaagaatcctggattgaaaaaatagatataacgccgggctcagatgcatatctgacgaactgagaggaacgttccttggattttagctgcttaccattgaagtcgtactttattatgaatggaggtgtcccactcaattggtatccaacgtaatccccaacacaatattccatggtagagtctgctagggatatcctaggaacgtctgttattgatattgaaatctgattaccactcgaagataggtcattgatacaaccgtttgcatcagtaacactatcaatgcttactaaatgatttcccaacgagaggccatcatacaatcgtttgtaatcaaagttagcagccgtaatattatgcatggtgaaagaatctgttttcgaagaactttcgtgataaatactgaacgaaacagagaaaggagctgagccatgaggcaccttcagtttgatatcctgcattagctttgattgctctatgtttgcggagcaggttctgtaggtgcttcctttctctaagaattctatttctggaagtgagtttacattctgtcttatcgaaagttgagaaggtttgtacgcaagtttttggaggtcagccttcccataattggaatcatatacattcttaatctttatcacatattcaccaacgacttcattagggaatttaattgaagcatacttcgtagcaacttgcactgaagatgagataagctctcctaacggtgaaatcatatcatattctatcaaaaagggtggtatgccgtttagagacatatcgatggtttcttcaaacccttggcagacatcatttttaatgtagttgaaatcgtccagttttgagattctgttgtgctcaattaatgagtacgtaggttttttgagataacttacttggaaagtatggttcggatctacgatcttgccaacacaactctggtcacgaattgaagccaatttatacaaaccttccttcataacctttaaggccggtttatagttggaactgaaagtcacctcttcagtttcgagaacgtctcccttgttatccaaatggctataggtgattctgaaaggtccttcacctgaaagttttaatggaagttctgcgaatgaagcttctttaatgctgacttgggaggaagattctgacacagcaaaagaagcagaaggaatatctcttctaacggtaattctggcatcagtaccacttagacctaccaaacatccactggaatccttcacagaaactaaagataggatatgatcaccaccaatgttgaaattaggtgtttcgatctcataggaaaaactttgaatattctctttattaaacgaagttctcttattagaagaagtctctactaaatcatagtttaacgtgaaaggaggctcaccactgaatttaataggtaccttcgttttccctccaagacataattttgtctctagcttccctgaaatctttgcactaggtttcactctcatgctggttttgaatgtgtactctttcgaatctaaggagataggagatgtgaaaagttcatttgacaattcggtgaaaacaatttcataactgccttctgatgtgggtgaataagtaaactggtttctggttccttgggagctgaatttttttgtatcatatagtttacgttctccttgctcagttttgtatatttttgttttgtagtaaaagggaggaacaccggtaaaagtaagatcaaaattcaagccgacctgtccaacacattgatctaatattggggttgatcttacagataattgaggaggaattggtttagttatcagaacattagattttccaatcacggcaccgtggcaatacctcgattttactgagagcaaattataagaacctggctcatcaactttgaattctaatgttttatcattgaattgtttttcgaagtatctcactttggagttgttatcttcatgggataactgaacgatgaatggagcatccttgttaaaatcgccagagtccaatttgactattaaagaccttctaacagaactgtcgggattcattttttcatccaaagatactcttggtaagtcgtgcacgtagaatctgtggatcaaatcatacttttctcttacttgtgatgataatgaggaaaaatcaatgctattaccaaatccatccacaattctttcgatagagtaaacatgttcaccgtattctttggttgaagtttctaatgcgatatctacagggtacgaacgagcccattttaaatcttggacatctttttgactgtagaattttgaattcgttagcaaaggtgattcaaaatattctggttgaagtgatgaatcttctagtacgtatctttggccattgattgtcttagtataagtcaatttaagaggtggagcaccttgtacctgaattgaaacctcatcattatctccaacacatctatcattttctccctttccgttaatggaagccaatgggcagtgaggtagcactaattgggatttgtatattctcaaattgatattattagtgtctagaacggttttcaactggtaaaacccgattttgttaagaggtacagtaaagtaatgtatgttacgatcagtttcttcctttgaaatatctgccttgagtggttttaaatcgttcttggtgaagttccacagttcaccttcatttgagtatagatctctgaactctaactggactgtattgattgtggatgatgagttgactcttataggtagttcaatggcaggaccagattggtccagtggtagacaaaaagacgagtggaagggattcaaatatgctgtattttctggcaaaattttaatggtatgtgcacctttgaagtgttctgccgaattcatagcctttcttgggttgacagagtcacctgttaaggacaagtctctgctgtgatactgtctccataatgacaatagaagcgataccaatgggatactttgttcactggagataaacagtgtgagggttgcggatgaaataatctgcaaaagcactatcagtggtttgaactttaatttgggtattttgaacgtggggagacagtaaaagaacaaagagtctattaccaaatattttgaaatgaagtttaaccttgaattcgatagaaaaatcccagataatggtatcccactcttaagtaggattagatcgtatagtttgtagcattgaatgataaaaaaaacgacgaaggctaatcttctctgactggctgcatcgagaacttcagtagaaatcaaaggtagctccttaatcgattcactcgctgggccattctttgctctactagtgcttgacttcgattttcctgtgtaattggaaaaaccggatatacaaaatggatcttcttttggtttgttgatctcttcatttcttcgatcgcttattcctcctctgaacgagtctttatctctatttccaacgttcctacgcctactatcactccacatcgatggagtatgtgtatagaacccatttgttccgaaactggaatccattatctaactgtatatgcgtctgaacttatctcagcttcccttttcaacagaatatgattctaaagtgccaatacgcagaagtttaatagaaaaaaatgggatcacgcatacaacttatcacttagtcgctcgctttttaattgacgattggtatgtaacgggtgcctggatcgcgattgcttgttgatcctagcctgcatctgcatacatgagaagaccaaacataagcttaaagtttgaacttctgtttgttgacaagatctgaatcggatatatcattatgtacgattcaggtttcgcttctgatcaaggtacaatggtcaaggacgcagcaactctatatgatctgccactacgttgtggtcttaatattcgaattatagcctcttgaattcttcgcctatccagaattaccagtgagatcgtttgcatcgatattataatgtcgattccgttgcatagctccattgcttacgtcaaattcccgtcaaattcccgtcatcctctcataaaaccctagtcagaagcaaggaggacataaatgctagtaagcaaatgtctttaccccatctggctaatgaatcctgaattaggtaagttttatcatgacctcatctgataaaaacctcggcaaatttgaatgccagattcagtaatagtaatgatagctaagggtcctaacatatataatatatatatttaccagagagaaaaagaatgttttggttggaatcgagatacttccattgtccaggatcgtctccttttttgaatcacaactggagcactggaacttatttgttttcaacaccatatacagctctcacgttcgtcgtatataacattacagaggtgcatttgaatctccttctataaaagaagtttagaaatttaaggttttgatttatttgatttgcactcttacaaataagtcatttacgagaagagagtttgctaaaacacgatacgttagaatctgtaagagtttgaggcgctagctcaatagaggtcagatattctgtgttgtaaattggtgatagttctgctgttttcattctctgtttattggaatttagataaaggaacgaaagacggtaatttattcttggcacgttactgttggtacttaaagattatctaaactgtgaaactgccatgcttatactatctcgtgtattcgagaggaaccatgttgaaattttgaggaagtttatgaagtttgtcggacctgggatcatggtcagtgttgcatacatggaccctgggaactattctactagtgtgtcaggtggtgcacaatttaaatacaaattgttgttcatcacattcatttcaaacatatttgcgattgtcttgcaatgcctctgcatcaagctaggtacaatcactggtttggatttagctgaaaactgccgtcgtcatttttcaaagcgtgttaattatattctatacgggtttgcagaagttgcaattatcgcaacagacttggcggaagtgattggtgctgccgttgcattaaatatcttgtttaacattcccttgttatggggtgtgctgttgaccgtttttgatgtgttgctgatacttctgttttacaggccagatgaacattccatgaaacgggtccgggcgttcgaaacttttgttgggattttagttggagcgacagttatttgtttcgctattgaattgttcaagatatccgtaccaagcaagttagaggtgttcaaaggcttcattccaaatcccatcatcttcaaagaacaacaagcgatgtatatctctttaggtattcttggtgctactgtgatgcctcattccttatttttgggttcctctctcgtaaaaccaagggttttcgattacgacttaaaaaaatacggtaaaattaaggaacaaccttcagtaggtgccattgagtacacgttgcgatattcgtacgctgaattgatagtgtcgttgtttttcatcgccactttcgtcaatgctgccattttaatagtcgctggtgcgactttatatgggcaacccgatgcagaggatgctgatttactctctatttatgaattattgtcccattatgtgtctccagctgctgggctcgtatttgcattggcaatgctctttagtggtcaatcagcaggtgtcatttgtaccatggcaggtcaaattgtatcagaagggtttttagagtggtcacttgaaccttgggtgactcgtctattgacaaggttgatagccatcgtaccctgtttcttagttacggctttcttgggagaaaagggggtatctagtattctaaacttgagtcaagtggttctctcattgattttaccaatcgtttctgctcctttgatttacttcactatgaatcataaaattatgaccgttgtggatgtggattctgcacccgcatctgcagacagtactgaagaaagtagattattatcgaaaggcgttaagtccattgactacaccaatggaagactgttgagcatcagttcatttgttatatggttgacaattggttcattgaattgttatcttgtattttcatacctcatgggagcggacgtgcatttttaagtctaagtaggcattttatatagttttgatggattctgtttaatctataatcaattcgtaaattgtacttattggatctgctttgttgatctcttctcttgtacctttgttgtggttaatttctttgttctttatataatctttaattgttcttggacatttaccttcgaaagtaattgaggaagtaaaaaaatcgaaacactgatggtttcagaaaataactccaaataatagtaaccgttagctatcactgataataaactagccccacagattattgcacactaccacagctgcgatttatagattctatacggaaatatctacttcactgcataactttcttacttttcttttttctagtcgatatggtcttgacgacaggaactgatccggcataattagtctgaaggactgggaaatgtttctcgtgcaattttggagatgtcacaatctgtttagaaagtagagcttctttcaagatgttctgtgctctatgataaagggaaacttcctcacttgttggttttgatatcttgttcagcttgacccttctcgatttacatgcctttagctttagcaatatctctgtcaataacctttgctgttcaccttgctcaaaagccgttatatcttcatcatgtatctcatggctaggttgccagtcataaagatttttcaaattaatattgacaggtccagctggctccgttgtcactattacttcatctccctcctcatttgtatcttgctcttcatccgtggcaacattctgctcttcatcattttcatttgattcctttttttggttgtcagatccgatactgtcatttgcttcctcaaccttttgatcttcaataccctcatcctttattttttcatcttcaacatttttatcttctgcttccgcagcccctctcttcttcgattctatttctaaccagcttttgtatccgaccttttccaaccatatgtctcctttacgggaacaatctgttacagacttgaactccgagatactcggagcaaaagattgatagtcgccatactccaaccatttagtagtgggtagcgggtaccaattcggatgcagaaaggaggtcatgatttctgtaggagaaattgttggatcaggaacattggaagtgttagctgctacgaatcccaatctattggctggttgggatgttgcttgaggaataattttcacaatttcacattcctcgtatggtacttcctttggcctctgatcaagtactgacctcgttatcaccgaactgaacaaatgtccctcctttgtctgcgtatggtaagtttcagtaacggggagctgataaacttgactaattttaaggaaatcattggaaatggtttttgaaaaatcactttctttgaagtcaatgtctgccgcgaagtctcccaccagtttggctccaactctataacattcccttagaatcaattctgctgcaaatttgtagaatttgtcgaccatttggtacgacctcgttccttgagagtagtagtgaattaaaatggagcatactaatttaatatcatggtaaatccgataaacagaatcttcatgcttctggtaatctccactagcaaatttatcagatatggaaattgaatcaatatcttctgctattttgatatctggattttcatcaaacttggcccttagaaacttcacgtaagaatcgtatatgtgtgttggatcaggctcgtagaattctttaggaaacctttcatctaaagctctgcatttcgaagatgcactaattaaatcaaaataaaattaatactgttagtatttgattgtaaaataaaatcatgctttggcaaatctaacactgaaaacataaaataaagacttgaggaaccccaggtcatcgtatgctggtctttaatttattattatcaccgattctagacaaaaacatgtgcgaatgcaacataattcgaatgaaaaatgtgttgtttttatattcacatacccttttaaaacagttagtaagttctgaaaaaaattctcttttagcagctctaccattgtttacttatttttagcccactataaaagagtttgcagaccttgtactctctcactgcccatcagtttgtcattcagcagtaatgtaagaagcctttattgatcaacctgcgccaaaacctgtgttttcattatgaaaaacatcaaaaccgtacatcatgatccaactggcatccattgacagcttttacagagattcctgtcacagcaacagtacccagtcatagcctaacaagctaggtattggcctttaattattccaatgcaattggtattatatgagttaattaattctataaattgtactggtgtagttctagggtcttttcgaagcttgatagtttttaaatgcttttggagtaaggaatttcttgaccgtccatacacctttctctttctcttgatgaacagggataggattgagttcccaaccaatcttgatgtcgctatcattgcaagatccaaatctaggaacaacatagcagaatctttctgttggcgataaatcaataggtttcaaaccttgtccagtgattggttttccgtaagtgagtaacgagccctttcttgcaacgttagccaatggcgtgcttttaatgtcacaaagagacttcatccttgttttcgccttttcattatttttattgacatgtagtgattggaaaaccaagtatttcggaggttgctcgccagaattgttgagaattgaggttggatgaatataaacaaagatatcatccaaagaagatgttttctcagcaaggactggaacataagggatattgaaaatgttggttttgttgatagtaacgtcttccgggaataactggtctgcgcgaacggccacctggtcgataaatcctgctgtgatcatttgcttgagtaatttgatttgaacatcggtggggatcgagctcttcaagtcttcgtctttaacatttacagctacattttctctcgaagtaactgacctgatgatgaacatcacctgctttctcaacttcataatctcctctacggtttttgcccttaagaaatttttttccatgaaagaactgtgctgatcctttggaatgaaatccaacgcagatactgcacttaaaagacggaaaacatcactgaatttatcaagcttactaaatctaattttgcttttaacatacttggagcgcaatagcctttttctttcctcagcttcgtgatcaggatagtcatctaattgtccttcatcttgtgtcttgggcacagtatccatgataccaagctcttgttcagataaaaacggctcacctactgaaagggcactgacaatggtaacaacatatttcaaacagtcgctttcattaccaacaagcagcattttagaaaatcttggacttagcggaaacaaactcattgctttaccatcatcagtgattctttcattactgtcgagtgcacctaggtgttgtaagagctttattgacttcatcaaagctggtctttcgggtggggtagggaatggaaaattcacaatattatgaacagccatgctcttcatttgcaaaactatactctccacaggcattcttaaaatttcaggcttagaaaactgctcaaaatctctttcgaaaactgcagaggagtataaacgataacaatgaccaggccctgtacgccctgctctaccacttctttggccagcagaagctttgctaatccagtcaatttcgaaactctgaacaccattattttcatcaaactttctttcctttgatctaccacaatcaacgacgtatcttactcccggtatggtcaatgatgtttctgccacattagtagcaacaacacataatctggagtttggtgggggatcaaggaagaccttcatttgctctttggtgggcaatagcgagtaaagaggaagaacatatagtggatctctatccgtctgaccttcttcaagtgtttcttcaaaaccttcttcttcgtcctcttctttgtcctcaatatcttcctcatcagagagtaaacaatcgtcaaattcttgttcctctctaactctgacactgaagtcgatatcttcagcttctacatctgcagttttggcatctattttcactgtaggtatgtggtcattttgaatgagagtttgatgtttcttggggaaaggaaactcttttcttaacctttttaccatgtgcgtgatctcttgctgtcctgtcataaaaaccaagatagcaccaggaggcaacctttgatgtattttacacgtcttcctgaaagcctcttcagcatagttataagctgttctacgattgaaatgtacagccactggatactgcctggcgtcgacctttaagacaggtggagaaacagggaataaagtagggttttcactaaaatctgatactctcaaggtggcagacatgataattagtttaagttttttgtacttagccggatcagttgcatgctccttagcacgtaagctgacacaacgacttaacataccaatcaaaatatctgtattgatgttcctctcgtgagcttcatcgataatgatagaagagtatttagaaagtctaaaatcgttcatcatctctcttagcaaaacaccatcagtcataaatttcattcttgttttatccttggtagaagaatcgaaccgaatttggtatcctacatattcgccatgatcacccatctcattagtaacacgtccagccatagagacagcggccactcttctaggttgtgttattccaatcatcccaggcgtgtcagttgaggacgaattaccatatcctgcctcgtaaagaaactgcggtacctgtgtcgttttacctgaaccagtttcaccacaaatgattacaacgtcattatgatggatagcttccataattctatgttcctcggcgaaaacaggtagtgcgcttctcacagcttgaacagcatcagatctccgtaccttgacataaaaagccttacgtgttgaattttcgttcacattaaattcatctgctttgagtccatcttcaaagtcttcaggtctctcggtcctatcgaccttgatgttggaggaaggcataaccatttctacatctctaccttcaagctttttaatttcctgatttgcccactctttaaattcttgggcaactgaagaacttacgtttctgcactgcgctatttctgaatccgatctttcctcgccgtcagactcactcgactcatcatcgctgtgactatcagcattactattagattcactctcatcaggttcactttctgcagtggatgaatgttcttctgattcactttcgtcagattcaaaatcctgatcatcatccagtttacgccttctacgttcttcttgctctaccttttgcttccagttataccttttcttcgaggcccttttattcaccacctttgcattaccgaatccaaaaccaaaacctgacccaccaaatttactgggtctattatcaataaatcccccagtatttgccgaaatagggtgatctgaactggtatggtccgtttcatcactatccgaattgcaattttcagctgtgctttcctgactgggcctagtttctggatgatcttgataccaatcccttacctcagtttcatcgtaaagaatttccctggtagtttcatcaccacgtccatttctttctaatttgagggcttcttcaatcccttgcctcttagtttgccttccttgtcccaaaatcttagaacttgtcaaaagcttagtatcaattttatagtcctgaagtttttctatcaaaacttttttctcctctcttttcaattgatgctcgatgaacttctctaacctttttttcttcgtcctagagaccttcgtttccttaggtgtgaatagctcttccaatttacgctttttctcttgtttctcttcctccgtcatgggtttcaatacagcagcgttcgtatcttcctgatgatcgggtgattcatgatgttcatcttcagatgaattaccttcttcagaatcagcatcggaagaattttcaagtgcacgggtgaactgcctattccttactctcttcaactccttcaacttagacatctgacccgcgcgtgctttctcattccagcgcttcctataggtacccatgtttgttgttcaattttttgaccgtttaacgtgcgaggtacttctcttgactgttaatgtcacagaggcctataacattcagactaccagcctgttatcaacgagattttgatatatagatgcaggtgagcttggatgcgatgagatgcgatgagctttaaagctttttctgccataaaggaagatgaaaaaaaaaaaaagaaagtcgctttcaacgttttgataattcaaagatataggcaatcttttgtacatttaagttcaaagagcagttgattccaccgttaattgggttttcaagtactcattaaatttgggaaacgtgataaatcgcattttttgcctcttttcaaatcattaatgaatggttcccaaacctgataagcacaacagctcaacagaggatgaagaaatatatggtattcttgacaagcctaatattaggcacgtccaatttggcttgaataaaagatttgcaacttggtacgggagtaatgtttattttggaagaaataagaggaccttgggcttcaaggaatcgaacaatgagcacaccgcaaaacaaagccctactgaaaagaagtttgaagatcagtattggattgataccctatacgtatgtgaatattgtttcaagtacactgatgatgaagcagagttaatcgcacatgagtgcttttgccgatataagaataagccacccggtagaataaaatacagaagccccgaatacactatacgaagggtaaaaggttctaagcatgaagttttctgccaatgcttatgtctatttactaagctatttcttgataacaagtctgtctacttcaaagttaagcatttcgaattctatattgtgtatgagaacaattctacagtaccgatggcatttttttcaaaagacttatattcctaccaccaaaataaccttgcatgtattcttgtctttccgccctatcaaagaagaagattgggtactctcttgattgagttttcctacactttatcaagatgtcagggtctgatttcgggtcctgaagttcctctatctcctttcggtttaattggctatcttaaattttggtctttctcaatagtttggcagttgactgaaggtaatttgaaagatgtggcccaggtcactttgaaggatctttccgaggccactggttttagaatcaatgatataattcaagctctcaaatatcttgattgtttaagtgattctgaaataagactcaatatcatccgttcatgggcaagacgcaacaaggtatcccatggatttatgatcaaagatgaatatctactacttgatgattaacgaattaaataacagcttaaatgcaaagccctaaaaggcttctatatgattgaatgtcatgatagtctattgaaacaacatttggatttcctcgatcctcttctgtctcctttctgcctcatcaccctcaacaatatcccctaacattctctttctttcctgtattcttaacattttctcttctacactattatcgataatgaaccggacaactttgacagtttgctgctgaccaatacgatgtattctatcaatcgcttgatcttccatacctggagaccaccatgggtccatcataaacgctcttgatgcacaagtcaaatttaatcccacacctccagttttcaacgacaaaagtaataactttatacaactcaaatccttatcgtggaactgttccaagattctagtccgttccttcatatctaaccgtccgtcgaatttgtaaataattacctgatctcttggcaaatgcgaacgtagctctatttctagaatgtctaggaatgatgagaactgagaaaatacgattatttgttcaccaggagaagtttcttgtatttgcttgagatgcctcaataaagctttaattttagtcgattggaaatgtgaatgaaacgaaattagttcatatcctctttcagcatcaattggctcctttagctttaacacattagcttctgagatcggcattctacaatatggacagttgatggatagttttttattttgctgaaattcaatgtattctgccaaacaaggttcacaaaatgtgtggagacactctgttatagagaccgcagacagcggttcaatacactcagtggtgcaaatagcacattcaaaagaaggtaattgctctgaagcgctgtgaatatcacgaaagttcgcacttaaagcatccaatttatcttgagaaatggaactttttggtgacttaatattttttggcatgaggatggaggagatgttttgagttgagttctccagatcttcaagatctgggtctccgagatctggtgtctttttgagtaaatccaaatgacagcagacttgtctaagtcttaaaatatggaccaagatattagtgtagttcttcaatagatcacctttggccaacccttctttaacagagttttccgcatcttctaacatggattgataaactcttttctcactggatgaaagttgcaacttttcgacgattacttcctttggaggtaaagagactaaaggtttgccatcaacatccttcatattcttcgttcttctgagaagcacaggctccaatactgcatttatgacatcaaatgcctgcgcatagttacctttctcgaaaggaactgaaacgtaacgcttccaatagttgatgtgagaccagggctctaagttcaagaactgaactaaggaaaatagatcgtcaagtcgattgatgattggtgttcctgtcaagatccattttctggaactccgcaaggctatgacagctttagatgtccttgtacttctatttctaatcgtatgaccttcatccaatattattctaaagaagaccacattgaataatcccgatgttgaggttctcccatattcgctctgaattatcccataagtagttatgattactgagggagcgttggggccaagcacatacgcccttaaatctttaatattattcccgtaataaatttcacaacgttttttgaggtccttgttggccttttcgaattctgattgccactgattcaataaggacatcggcactactatcaacgtcgtcctgtaagcataagtgtcatgcttatgttgagaatggcgtaatggagaggaatccacttgagaagacatctccttcatagaaggctttttggttgactcaattttcttttcatgagcctcatcatagctagcagtacaaatcaatgctaaagctgatattgttttccctagacccatctcatccgccaaaatacctccattgattatcgtcttaatgaccggcttctcgatagaaaactcaccagtgtataaattagcataaaagaagcaatcatcttcgtggtttggagtcccttgttttgaattagatggccagcggaatttcttccatagtggattcatactattcccatcaatagacacttctgcggctttctctgataaatgactatactcgtattctcttttgagcatccatgacaaactttgcttttggtaccttctcaattgcaatttaaaaagtgattcatctggggtagtttctggtaagttttgcaatgaggccgcggactgtgtaattctgtaaaatgattttagttgattgatgttcaaagcttcatcctgaaactgggaactagaaacagtgttttcttggtagttaggtatcatctcatttttggtgtctccgtacactggttgtatatttatcgcatcaaacaatgccattatcgctccggcgcgatgcaactgacgtgtgtccatgccatggtcattgataaaagatttgttcagaatacttccgccttcaatgcggacgaaagcctgtgaggtcaaataacaatcaattctgatgtaaatattatctccaacactgaatctcttaccattattaatgagaagatatggctccagactgacctgttcgctgtagtctaaaagtgggtacaatattcttgcaacatcttcaggcattcgaccaagttctctatcctgtgaggtatcgattaagcgaactaaatgcgaacagtgctggtgctgaagtgatttacctaagggaagatccttcggtacagattttttaaaacctaaacgggatccgataggaactggttttacggttggccgtgtagcgaatcccatagtatgaatagacccaatgtaacgagaccatcggttccttcccttgtcagatgacataggtgattctaaacctgcttgggtgctggtcctcttatttgtaaacagttgggataattgggacgaagacggcagaatagacaattcgtcatcattttcttcatccgacaaatctatcacctctatattatcaccagccggcattttagattcagttttacttttggaaagtaattccttgtcctcaaagaatttatcagctgcaatacttataccatctttgagcagaccatatgaactccaaagagtgtggagttgagaggacgaaatcatattttctccaagaatctccttcaaagattcaaaaaacctttccttatgattagatgtattacttgatacttctgaggaactttcaacatgtccttggccatcatcagaatcatctgcctcatcctgtacaaaaagagatcgagattcgttcaaatttattacagattcatcttcatcacgaaagaaccttggtttttcatcagctttttgcggctgtgtcatactttgggtgcccgtattgctagaatcaggtcaactgaaagatatatatgggtagtgttccaagtattcctttgctgtgcctgaaatgattagtaaagagatgagctgagatgagacgcgaataagttaacaatttcttaatgcaaaacaaacgcacgtgacgcgtaaatgaataaagtttttgtgaataaaaaaaacttcgaacttgaaaacttccagaaaataccacgttgtggaaacataatggaaataagaaacaaaatagaaacaaaagagaaatcggttcgtattcctatgaagtaccacaagctgaaatttcaaagcatcgaaacaatttcatttcccaatgtcagacaataaaagtatagagagagagagagaaagaacttggattctatatgagttttagtgctaacaatcccgaaaagatcggacttaactctggataactgaaaatagcggggttctgcggggtttaagttcaattactaccagagaagactgtaatccaggactgtttccatccaatacttatctccgtttagaagtacgttttcgacacactgtgtgagattatatgttatattataactgttatagagatgagttggaatggtaacaagttggtataaaatatggtatcataccacgcaggtgatattcatccttttatttgttggtttttctgttgttgttcctttagattgtattgtgcaagcgtcagactctagcaacgatgcagttaatacctttattgtggtcggtgcagctgttgtattagtggtatttgggatttctattagttttgctcgtgtattgatctttcgaagatcattacaagatataccgaagaaatacattccagtaactgcgcaggatatgcgtcataaaccttcaagggaatatgtgattgaaaatatgaagagagctggagaattggcggaaaagtttaaagtaccgaaagagcctgtcttacatgctggcatggaaccaaaagacagtgatatgtttcctgaacacttgaaatatgcggaaattgttaaatttatctctgataggtttagattcgacggggctttgctgttgaattttgtcactgaatcggatctcagtacaactttcaaaacagcacttcataaacttttcgagaatgaaaaacacccttataagcagtatttggatgagtttatctcgctttatgagaaattccgatttagtggacaagatattgaacgaaacgatttcgtaaaattcttaagactctacaaatatctcgctgatttatcgaataatttggatttaacaagaatcgagtctgtcccatcccaatttcttcacgttcctactgaagattatgacactgatgccagatctagaacggactccgaattctcaactccatatttacgaccttacccgtctgacgccttcatgcataatacaacccctgcatcacatgtgggctctcgctccagtaacttcagttacgatatagatgagtctgcagaaccaccagaatctgtggaagaccaacaaagatatcatgacatgctcactagagtagacacttacaataccgtcatacatagatgattaaaataccggacagtttctgtaacttattaattaaagcttttggacttaataattataaacaacaacgactcttatcttatataatacacaacgatgcagaaaggcatcaaaaaagagaacatgactaggagggtatcattagcaaacaacccatcgtatcgagaactttgatgtcaattcgaaatcaatatacctggatataagctggcaagtagttctggttcacgctcataattctgaaacttccgaaatccatctgttcaattgttgcttggtgggttcatgtggcacgccttgtaatacatcattgatgaacttttccgtcagaacgctaaactcatccgagtattttctgagcacactctttaagaaacccataattgcttcgtatttccacgcaaggtctaatgatggtaactcttcgtctgttgcctgaatgtcttgatcaagatctggaacaacaattggatcaatagtgttcaattgcgacaatacctcgttagcagcacccaccaacctgttgaagacatactcaaaagaaccaacatctttgtcagcagccatagccagctcattcaaaattctgaaaatagactcaatagaagtagagtcgacgagactcatgtttactccacactgttcggtcaaagaaaagtttaaaactgattcatttgaaattagaccattatatctcaaagagtccaaaatcaagtaaccagtttgagagttactattccagtatctgacaaccgcctcacaaatccattgatctttaatttgcggcgacacctctacctgtgccataattgctttcaactcttctctcgaatcatcaatatatttgtttgcatgggagagagatctactaccacagaaaacaatggtttgaatcagaagagtcacagtaaatctattgaaatcttcaataattgacccatggtttacagcaatgtccttgagaataccctccaactctgcaacagatctggtgtcaggttgcttgtggaagaaatccaaaagttgagttacgttttcatggaatgggaaagatggagatctgaaatatagctcattgttacgaagatcgccttcatccaattggaaatctttgaaaagagaggagtaatagttaacaagatcttctctcttgatgaaagatggatccatgaatttttggaattcatcagtaacactttcttcaacatcagcagaattggacgttaatcttaattcctttctgatcaaattcttaatgaatatcattcttggattgtaaatagttctattccactgaatggaatcaacttcccactcattccatttccatgagaaattgaagttactcatttgaattgagaaccaatctaggaacctagcttttaactcgaagtctagtttatccaaattgttatagaaatatctgaaagctctaccgaaaacaggagcaatagcttttggcgagttcttgcaaatttctaccaaaagagaatagaaataggcaaaagattgagaaacagtaggtaatttaaaagttaattctaagatggcaccaacggctaaatcttcgattttgaaagtacttcttgctgggttttcttcaaattgttccaagagttgggcgacaggaaggcccggttcagtgaaaatacccgcagtgaagaaaagatcaatcgttactaattgtctcgcaacttcaagtctattgaactccatactttcgattatatcaagaagaatatcttgaaataacatacctgtgaaggtggtagttggtatcacggtagaaaatggacccacactgttcggtaagtaaacctcgaatgaatatcttggagttttccatagactatcgactgaaccgaagcctttgtctaaacctgaaaatggaataatttgttctaaagttggtagattcaacggctcattaaaagaatgaattgctatttgttgggtcaataaggtgtcataattcaggaaaagctcgcctagttgttgcatatcgtttgccaatgcgttcttgacatttggcaagacagcagtaacccaatgaactggttcatatggtgggttcttattgtatgctttgagcaattgaatatcagtatctttaatgttatattcgttttcgacaaaagtgagtaactcctcaactaaagtttttaacgattcacgattatccgagttgaagtagaacaaatatggaacgttcaacaaggtgttggtatagatggcttcagaaagtggggatcttttctccgtggaattgtttaaatcgacggtaaactgcaataatttcttgtacaagtcaagcaaatcatctggtaccaccattggcgatagaatggagataaatctgagtactaacttaattttatcccatggtccaatatcatgagatttggtttggtagtcggggtcatgacttgaattaagtaactcttgaatttggtcaaagaaataattcaaaatacttttaccaatttctggtttagctgaatttagcaccatggttaaaagagcaatacctggttgcttatgaggttgttccaagataactgctctgaaagttttcaaaagtgcgttgttgaaatactcgtcattaccgaattcatgaacaatggcctcacttaggaacttgatatcttctggaaaagccttggccgattcacccatggtcctgatatcaggcatcatgtccttacaaagcatgacaacgggtggcagcctttgccttttggcaaaatgtggcctcgcttcacgataaccactctcttcttcataatctacaagaatcattgtgtttcagaaacagttgttagtaattatatgcttttccttggaaaacgttaatgtaagtctcagatatatatctgatactattgctttctctctgagttctaaaccaaagtgtcaaccaaccgactacttttaacgaaacttcttcgatattattcagagtaaatcataccgaaaacttgaagtatttataccgattgtcgatgggatgtctctctagtctagatgtgtgttttgtggcaatcttggaaccgtctgtcatctgtctctctttgctgacgtcgctgtcagttgtactaagggaaaacttaaatctgatataacaatacgtcagagatggatagaaccttcaaaaaacaatgcaaaactctaacgtcttgaatggtgacataaattaaacataccaaaacctctttttgacatctctcgggtacttgatggcgtattgttggatataatactgatatcagttggcaaaatcttgattgtaacgttatgaattcgtgttttcatatattttaattttttttcaattttcattttgaattcttgttatggagacgaccagacaatcaatgccattcgatacttaggccaacaggtacatagttgaaattgttaaagcttacgaatgtcagggtttcacagcctgtagattaccataattagataacaatgtgttttcaacgttttttaacatatatatgtatatttcccaaattatataggtatatgcttgactggaaaagaaatcgcagaaataacgagaccttcaaaatcggaacgaaccatacatggattcttttcattttgcttcaagaatcatgtacttgcttctgcaactgttctatcagtagatctttggactgcagttgcgtcttcagctcatttatttgaagggcgagttcgttaggagatggctttataccatgttggtataataaattctgttcttctgcaatgaaacgtttgagcctttcttcgttcaaattttgaatcaactcaacaatctttgacgattttttccttaattccgtttcgaaatccagtagagaaagagcctgaggtgactctggttccttcggattctttgattctaattcactttctaatctaccttcccttgcgatagactcggctaattccgtggaaaccaattgtagctcttgcatcaacatcatattttgtttcaaaatattcaaatactcttcagtgatcaacaggggttgtttgggatccttttcagaagcaaaagatggcttatatggcaacgcggaaataggttcagccttctgttttacatattctttctcaagacaaggcacttcctgtatctctgtgctttcaccaataatcatcgacttacgaatttgcaaagttgatctgtcaaatgtcttttccttattactatattggtcgtggtgattaccagcagatgacgcggaaaaaagagaatgatatgatattctacgtttatcgctggatgcacccgatttcgccctgaaagtatcatttaactggatttcggatccttcatctactgccatcgaactcctgctgcttctagcggacgaaggtacagtagtgagcggtctttgatcgccactcttcgtccttttgatcttcatcaaaaagttcttcgctttctggaaactgctgcctgatttcttcaagcctttttcaccagaacatgcgatataggaatcatgttttgattgtagtacttcgttagtattactattcccactgtcgaccgccgcatgggcttttgatacaattgattcagttctattgacgttgtcgccaaagtttcgactggaagagttgtccgagatttcaggatttaatattggtgatagatccacgggaatattttgtatcaaggcggtggatggcctgagatttatgtcatcattcaaagaatcttgctggttgcttttcgtttccgaggaatccactaggtcgtattccttttccgttttttcctcctcgatctgcaacacttgtcttgcgggttcacttaacgttaatatattcaatttcaccaatgaatcagaatcatattgctcatcgctatgtgaatgatccttattcccgctgtaggtttgttgatcttcttcttcctcgttaaagctaggaagagccttgtctttttcaaagtcctcattatcattcgacaaagtggcatgtagttggtatttcaccggtgatcttggcagtgatggtatctgattttgttcatcgaatgatgcgttcgagggagttgtcggagaactttgttcagaaaccctaccagaaatgacgctattcacactggcatatgaagaggatgagcccgatgccgccttattcaccagctgctgtggttgtggcggaggggctaatgagcttgttgcttgtctttcattgaatacattatcctgcgatacattttgttttggttgataaaatggttgcggatacgattgagtttgcagggacatggctcttggaccagagtttggaccatattgggagctaccagtaacaggtggacctcttgccggcactggtccattaacttgaccaggaaaacccatgttacgggatcctgttggtgacgcggcatacggaccttgataaccgtttctaaactgtgaatttccgttcatttgagttggtggacgtctgtcagcagttaacgacattgtgcgtgggtcatttggaggaccttgttggggaggataccctggtctaccagccatcggcgaagccccccctcccatcaaagagttgaatctgctaccgtttggaggcctagggattcttgattgctgagggcctgctggacccatcattgttcccgggccagaaacaccaggccttaccataggacgttgatgataattttgcaaggacattgttctaggaccacctggaactgaggcactgaactgcgcttgctgctgctgctgcttcgcaagactgttaaatgccattttcttttgattcatcataagttttctatattctatattgttcattgagtttgtgtttccggaagtcacgatggtcggtattattggagaggtatcatctagatgtccaccgtaaccgtatgcgtgcccaccattgtttctcatggaagaaatatcattgaatgtaaggaaagaggaatcatgatccgaaaagtctgtattatcgtcatcctcattagctttttcgtcatattgactgtgtctcttttgattgagtttcttgtatttacccttgaagaaattagagaaggaagcagtagaagaactcatggatgatttcctactactgtctcctgggtaatcaaaatgtggtcttggttgcatctgcagagattgttgtcgaggctgttgcatgtaattatatgacgaagggttgtaattggactcgtactgctgggcttgtaacggaactacaggtggggccatggggcctgtatttcccttctgcttgtttatctgctgctccttagtaatatcaatattccctatatcgctgtgaagtaactggttccgcagctgggccttggaagacatgcccgctccacgtcgttgatcaagcgcagtaacaccggcatccatattccacgatcagaaaaggttagaaataaagcacaacctacaagaaacgaaaagatggctagttgtaaaatgagctgcacttacgtatagaaaagttcctttaacaatgacaaacaaacaatctaaggacttacctctaagttgttatcaaaagtcctgatgtaccaaagaagcgttccaaaatcggtagggaataagtcaattacactcgtactgtggattggttcctctggattataaattctgccagaacctaggctaaatgactgtactagaaagagaatagataaaaggaaatacaacctattaatagtgactaagtccaaaactcaaactgattcctaaattgtttgaacagacctaagattcatttactttccgttcatatttttttttttttctcaaaacgaaatctgaatgccatagaagttccgagcgaacatgaaatgtatggattatgcatgaaacaataacgaagagtgaaaaaggaaacggaaggcagctatttaggatgtgcctttacacaacgttgtatataatagatcgtagtaatctgacgaaataatggcttctgcaacctttgtatttgaattaaattttatatggttcccaaatgttacaagtctatgcagtggttattgcgtttaaaaatgattttacttactgtccaatgtagtctaatcagaaagttgctcaggtgagagaatggtttatcaccagcttaagctcttcttgattttgttttcctttttttaggtgtagatgatggtttaggatcaggtttcgcaacaccctctagatttatctcttcagagggcttggaaggctcagtcttatcagtctttttagattcagctgtttgtagatcttcgttggtaacaagctttgtgttttgtaattcgtagatgaaccacgtcacggtgatccatagtagagtggcgataatcgttaatgcgatgaaatggatatttttggttaaatagatctgcgatcccaacacgcaaagcaatagtgcaaacgagatatgagtagcaatgatcaattgaggcgatgttcctggttggaaaatgctttcccacagtgcaacaacaaagttagtcattcttgagtgtctcaggtgaatttcgttttttatagtggttggcaacggaggattataatatgctgtactagaaatcgatgatgagcctggagtagaaatcagcaaggtatagccagaatgcaagtgaacaagcttgtaagtatgaaatgacgacttcctattctgatcgagccgggtgtattatgttatgtcactggcaaacgtatgtatatgtatagaagaattttacttttaaaactttaatatagagattttaagatacagattatgtatgtcaaacttataatttacagaccgataacagaggaataatgaagttaaagataaaatggaatagaaaagggaccacatcagagtactattggagaaactgatgattagggtgtccgatgcatggatgaatagtcaagtatgatctaggatcatgttggacatgatgacatttgtattgaaaaagatgggaaaataaagtgacagtctgtgtttttcatcgctgttcgattagataccagcgccgaagatgaaagaaccagccatcatcaaagcgaataggatactgtacttagagttgattgggttagcaaccatacctggagcagcattgtcagtggcagtgctgttatcacctgttactgcagcagtagaagaaccggtagcagaagcagaagaatcggaagtaatgaatcctgtagatgtggagccagtttcaccagagccagtagcactagaggtaccagaagcatcagaagcaccagattcaccggaggcagttgcactagaagtgccagaagcaccagtggcatcggaagcagaagcatcggaagcagaagcatcggaagcagaagcatcggaggcaccggaagcgtcagagccagtagagacagaggaaacgacaccagtagattcagcaccagagctcgtttcaatggtactggaaccaccgtttccaactaagccaacagcagaggaggcagatgaggaaacagaggaggcagcgacggcttgtgcttgtactagagagattgaggcaaaagacattattgtgttgttatattaatttggtggctagtgtgaatgaaactattgatcttgtatattgcagctgttaggagagagaacatataataatgaatatacgtataagccgagtttagatgagaaattgtgatcttaccagataacaaacgctccctttatatattagattcattcagcatcacaagaagctgtaatcgcttatggcttattaccaagtccaggcgtattgaactttaaattgcatgctgaactgccttgcttcgagaaatactgaatctggaatttcacttactactataggtaagaattgaaagacttatgaagtaagattctctcaccaacacacgttcgaagcatcgccaactagccaaaaaaacacaaaaatagctagaagaataataaaagctaaatatagaacagcctctgtttcaaacaaaggtaatttcttcaaattcttgtttagaatgtattcccaaactgctgaacctaaagaagctcagacattattcaagcacgaaatgccaaaattaaaaaaaaaaaaaatgataccaagcggtttagcctcttctccacgtattgctgccgcatgtgtctcgagattctaaattacatgcttgcttcaccggttatgggacaatgaaccgaatgagatcgctagatctgtaagtaccaccagagttaaaagcaaatgattacttaagtctcgatctggccaaatctggaaattcaaatacgaaaggaatctctggatcgcagtacgatccggaaaaaaaaaggacacgagagtaggagaacggacggactagattgggccaatcgatccaggggagctccgccccgaaacaaaattaaaccaagccaagcaagcgttcattatcttacgtgcttttctcacatgaccttaaaatcgaaagcaaccttaaaaccttaaagagcttctactaatagaaggaacctaaaatacgaaaatattgcatttcaagacatccgaagacgtaagaaaggaaaataaaaaagtggaggaaggatccattagactggagctagtgtaattagaactagaacaggacataaatagaagttggaaatatgacagtggaaagggtacgtaatacaaagtccggtttcacactaataatgagaaatcagtattggatctgagatcgaagcaagcttttatgctaatcgggggatattggactagcaccgccaattaaggatgccaggtaagacagcggactcttgaagttctcgaaattttctttcacgagcgagaatcacctattgtctcaaattatgcatatcattattatagtatatatgttgttcttttgagttacattaagttacattattttcaccactagtgatcgattgaattagaatggagggatgagtagtgggtaaacgagtgaaaaacctatcaaagaaggttcaattacaatagtagacttgaaacgaacagtagtgctgacatggcaaatcttggtctccagtgatggcctgcatttcctgattgtgtagcagaaagccctgtggaagacgaattagtggtagcggtaggttcttgggtagttgtgttttggtttatttctcctgttgctgcgataggcgacgacgaatctgttattagagaagaaggaagaagtagtgaggcagttcccgctgaaatttctattccactttcttgagctgtccctactgtaggtgtagacacaacaaacgtggatgcactaacgttaatgatctgtgatacatccaacgataggatagatgttccacctaaaacatctcctccgttggaaaatgcgtagctgacactagcggtctgtacttcaccatctaccttgattatatttgtaacggacatgaggttatttggatatttttgatgttattcttattgctatgatatggctgaaataatgctaatgagacaatttttgtgatgcctctgtgtcgttcgattgggcttgcgtgttgaatttcagacctatacttccaatctctttgagttttatacacttattccaaaatgtcaaatgtaaaacacttaccagacgtataatatatacaagagtcgattacgaactttctatttgtaggactgttgatatcactcaaattcttgacgctatatcaattttattccttttcttctccaacagtgatgtacggtttaccggtgaaacatactcactattcgaacaccgtttcaaggttcatttttaaagaaaaagaaacaagagcacacacatacacacacagaagaaggcaaaggccagaacaagttccaactgagccagacctcatcatccagggtgtgtaacatcatccggacctgcctatactacggattaatgcatggttgatccaaaaaagaagcaacaagtgcaggggtagtgatgtaaagacagtaaagataattgagatagtgagccagaacgtttgagatcataaccttttcgtctcgaatcactcccaagtaattcaagttagctgaagaaaaaacacataaggtggcttgcatacttacgaaatatgtagaatatacccaacaatctaatgttgttcttgatccaacgatcactttctcggccggagaccaatttgagcagccagctgctcttcgccggaaaaaagagctctaaaaagaaaaaccgttatttaacaaagagatcgaccaattttctgtgagacgacataattatgccttgtaaaagaaatactaaggaggaaccagtatctgcaagaagtcatacgcgaaacagcacttcaatcgaataacagagtatcatatcgaggctgagacgcgtcaaacatgcaacccaggattgtgttaaaggcataggttaccattcactctggacttaactttggcttcgtcacattaaaacacatcaacttttccctctggtacgtttcatgcacaattacgtttttttagtttatttttatgttcgaacctctttttctcggattcttgtagttgtatacgaattatgtttcgtggtaaatctacatgcgtcatttattaaaaagaaatgcaaacaaaagaatgctattacccggaatactaaaattatatcacgtgacgagtatttttttaaaaaaagtttactcttaaaatatgatcatcttgaacgaagaatgatgcgacgctagatttgagccaaattttttttttcaatcgttctttgtctgcatcgatgaaaaattttcctttctgcaagttttatataaactcatcaccttctttcaatactttttacctattcatttgtgttgttcgaattcatcatttgtttcaattcgttcttttatagcctccctcctcatcaactaaactacatatcgatcaatcaaagatgggtgcctacaagtatttggaagagttgcaaagaaagaagcaatctgatgtcttgagattcttgcaaagagtcagagtctgggaatacagacaaaagaacgtcattcaccgtgcttctagaccaactagaccagacaaggctagaagattgggttacaaggccaagcaaggtttcgttatctaccgtgtcagagttagacgtggtaacagaaagagacctgtgtctaagggtgctacttacggtaagccaaccaaccaaggtgtcaaccaattgaaataccaaagatctttgagagctactgctgaagaaagagttggtagaagagctgctaacttgagagtcttgaattcctactggattaaccaagattctacttacaagtacttcgaagttatcttagttgatccatctcacaaggccatcagaagagatgctaaatacaactggatctgtaaccctgttcacaagcaccgtgaagctagaggtttgactgccactggtaagaaatccagaggtatcaacaagggtcacaaattccacaacactcaagccggtagaagaaagacctggaagagacaaaacactttgtctttgtggagatacagaaaataatctggtggttcttaatcgaaaaaattcaatccttaatcattacaacaatatttacaattcttttcatttcatcccatctatcttcgcacgcatgtacggaaagtttgcaggtttatcaaaacaactctgcgtactttgactatataaaatatacctagtatatctgtcctagatagccccgaattaatatcattaaacctcctttttttttaacaaaagtgcaattgatccattagagctatgaataagccttacttgtggatagtatcgctatttaaagaatgttgatcagttgggacgatgctcttccgctatggtttacaggaatttttttaactctgtgattttctgacttgtggcaagtaattttttttactactaaaactatggagtcatactatacattttcatctcatcacgttgaaaagggagaatgcacgaaagtaaataggatactgagtatacagagaaggagacaggtacgtccagatagagtcgaacacttcgtagagcctacagaaaaaaaatacgcggtaagactctcttgcgctcttggaaactcaatgaaaaaataacttcaaagtaaaaaaaaataggaaattttcagtacaatgtaaaatgtgaaatgaatatctctaatcctcctaataaagtcaaaaaaaaaaaaatagaatcgaatttaaataaaagagtaattgatgaacttcccaacccttcaaataattgatataagggaagagtaacgcattgcaatccttatctggctgctctcttggtgttgatttagtactaagacactttgcttaattattcggctttgatcagaacggtttactaacagcaataaaggaataaatccaggttacaacctttttataacaaaagaagcgtgaatttatcttttaatttgagttaaacattattttctctggtagttgaacattcgataatatttgcactcatcaagttaccatgccacacactaagactgctattctctctgtctatgacaagacaggcttgttggatttggctaagggtctagctgaaaacaatgtcagaattttggcttctggtggtaccgctaagatggttcgtgaggctggattcccagtggatgatgtctcttccatcacccatgccccagaaatgttaggtggtagagtcaagactttgcatcctgctgttcatggtggtatcttggctagaaaccttgaatcagatgagaaagatttaaaggaacaaaacatcgacaaagtcgactttgttgtttgtaacttgtacccattcaaggaaaccgttgctaaagtgggtgtttccatcccagaagctgtcgaagaaattgacatcggtggtgtcactttgttgagagctgctgccaagaaccacgctagagttactatcctttctgacccaaaggattacccacagttcttaaacgaattgcaaaagggtgaaatttctagtgacttgagaaacaccttagccttgaaggctttcgaacacaccgctgactacgatactgctatctctgatttcttcagaaaacaatactcggagaacaagactcaattggccttaagatacggtgctaaccctcaccaaaaacctgctcaagctttcgtcacccaacaagaagaattgccattcaaggtcttgtctggttctccaggttacattaacttgttggatgctttgaactcttggccattggttaaggaattgtctgcatctctaaacttgccagctgctgcctctttcaagcacgtttccccagccggtgcagccgttggtttgccattatccgacgtcgaaaaacaaatctactttgttgctgatattgagaacttatctcccttggcttgtgcttatgcaagagcccgtggtgccgacagaatgtcctctttcggtgactggattgccttgtccaacatcgttgacgtcccaactgccaagatcatttctcgtgaagtctctgatggtgttattgctccagggtttgaaccagaagctctagaaattttgaagaagaagaagaatggtaagtactgtattttacaaattgatccaaactacactccagaagcattggaatccagacaagtctacggtgtcactctacagcaaaagagaaatgatgctattataaataaatcttccttcaaagagatcgtttctcaaaacaaggacttgccagaacaagcagttattgatttgaccgttgccacgatcgctctaaagtacacccaatccaactctgtttgctacgcaaagaacggtatggttgttggtttgggtgctggtcaacaatcaagaatccactgtactagattggcaggtgacaaggcagacaattggtggttaagacaacacccaagagtcctaggtttcaagtgggccaagggtgtcaagagaccagaaaagtccaatgccattgatttattcgtcactggtcaaattccaactgaagaaccagaaaaatcagagtatgaatcaaaattcgaaactattccagaacctttgactgccgaagaaaagaagtcgtggatgtctaagttgaccaatgttgctctatcttctgacgctttcttcccattcccagataacgtctacagagctgttagatccggtgtcaagtacattgctgctccaagcggttctgtgatggacaaggctgttttcggtgctgctgattccttcgatttggtttacgtcgaaaatccaatccgtttgttccatcattgaatggtgttgaattgattgtgtctttactcttttatttaacatctctttctattttcttaccattgaaaagtataaatcttaatatattagtatccataagtattacgaactgaaactttacgcaacatttccttccattgactgttcctaccaaactacggtttagcctaaatttgatatacaatgtttgggggaaggtaactcatcatgatacaggaccatgtcattttcatgaattaaatcagttagttgttcactgataattaaccaaattacgcactacatagacaagaaatatagaggtaattagagaattttatacaaaagatgtctgcagtatggttttacccaagtgataactggcccatagggcctacacagtgtttaggaatatactgcggtaaaatgacaacgagatgaccgagctcgatttgatacactttccggaaagaaaactcccatccagcacatcaaagaactcaaagtcatgcattctacttgctattaagatccgttgacggggctacttctgtctcatccatatacataatggcaacaaccaaagatgcgaaccattcagaatatccaaaactaggccacgactcagtaccctatttcgaaaaacagaggagaagtaggccctcttaatgaaaagaacgttaaggacactcagaagttgaacagtttgcagagcttagttccttgaaactctgcctctcgagcgtcaatcttgttagtctacataaacagaggttaagcagcaataacaaaggatcagctaattaaagttagagtcacctccctctgtccagcgtagctaacgcggatctatggttatttaagcaaataaatcaagaataatcaaaaatacgtacaattacagtgcggcttaaaattaatagttactagtagttgttaaagaaaattttatgttgatcgtttttatagtaatttttttctttcactttgagctcaatcgtcagacagtagagaaaaaaaacatcaacatcattacccggtgtaaagggctgtaatgatacatatcgttaacgcttaagggcatatctacataaacacatacatatctatacaccctcacactagtgtattagtctgaaattgatttcgattgatcaatattctaaacaatatttaatttgctgtacccagaaacttctctcctgcaacaaatgcaggtattgaatccacgaaggcccaaagacatcctacagttttcgcaaagggcaaaacatttacatggccatagaattatgtttcttgtgtttgtcttacaaacaacacatgcaagatctaccgcttcatcgtcagaatcctgatcatgcaaatgatgttcatgtatttcgtgtatctttggagaacgttctgacattacttcgcgtaatatgcctaattcgttgtttcttgcaaacctccgtctggtcaacattcgttcatttgtaacgttttcgtagttcagtatggcccacgtagaaaggtaccaactcatttcatttggcgaacggatcaattcctggatttgttctggattgaaaagttcttgtgccatagccaattgtctattatttatccttctttcttggccagctccgtgtatggggccttcggtatcggaatagaagtcatcatccacatcgttaaaattatcatcatactcgtcttcgtcatattcttccaactcatcatcgacatcctctatttcggtttccaaaggaacatagtcctctgtgtagtcctcttccggtaacaaaaatttgtcagtgtccttttcatcctttacatgaaggaatttgacatagttgttctccgtgacaaagtcattgaaatttcgttctggttcttcgagaatgttacggcccttgtttcccttccagaaatatttgaaccaacctataagatatttgaccatagtcacataccaagatattcttaatctccaaacagaagttgatcgaagatctcttctaaagtcgagttcctgtgctggtaccgcatcgaccttatttagatatccgcttatcaagtagcttttgtgtagtgatgtgggagttgtaacatcttcgaactctctgtgaataccattagttctcgcctgttttggattacagaggaacacggcaaactttaaggcgacagagtaaaaatcttcttcaccacttaagttcaaatacgtggtccaattttgccaaaatgaataaaattgtaactcttccactctacttgttgctccgaaacgtgaaccaaaatttcccatccttaccaaacaggatagcttatagcagagataagaaaggatgacgatactagtggataagatctttggaccatttttgaacacacgaaacacttgaaaggaccctataccagataaatttgaagtgaattgtaggtaaatcatatagacagaaaacggaacgttcaacaatgtagagaatataattctgtaatgcctaatattgaaaatttcaacaaaatgtatgataaatctacctaaaaggcatataatgcatgtgtatccgtatgaatcaactgttgcattagacttgcttagctgatagaacgcgctactcaactcgaaaagcgaataatctgattcttccaaaggctttaaatttgcggtggtagttatgaaagtttcaatgcaatgtgatagacatacaattccgtaacaaatggacatatacgaaccagctggttgttcctctccgtaaaatctaaactgagcaccaatttgtataagcgcgtatcctaaagataacaatgcaatcatatggaaagtgaccttcgcccaaggagccaattttaactgttgattcgttgacctcaaactggacatagccattaacctattcaaaataactgcaacaaacaagcaactagcagcatatccagaaaggaaatatgtaaccgacatccaaaagaaatcaggtgaagttgtgaagttttcgttcacctgaggttgttccacatgagcatgaactgaggcatagcgttgggcaatggatgaaacgaacgatctaaacgtttgatacggcacattaatagtctgagccaaaagtgacgtgctattgataagagtgtgagaagtttggtccagataaggaaactcggctagaatcgactgattaccgggcgtggttacattcgccatggcatgaacatataatagagcggttaatattaatattcaaatctaatgggtgaaaaaaacttaagaataatggaagcgtttttacaacttggaattgattattcaatgttctcccaaggtgatagttggatcaagcaaaccagtcgctggcaatttcagattggaattgtgtatctatattgaaggggattcagggacagaaatgtgcgaataggtatcttaactttgttgtcgaaaaaggagattcggatcaatataactattcagtacacgagagtgcggaccttaaaaactatacaaaagaactgaagaaatagttaaattgataattcttgcttcctttgcttggttaggttcacctcttagagaagatacatacgtagatgcccatattaattgtcgtaggtaagcctccagatactctgaggaaaatctcgtatacaatcaagacgagtggatccgggtaacagattatatttatcttaacaaagggaattaaaaaagaaatggttgcgaagagattcgaactcttgcatcttacgatacctgagtgttcccaactgtaaggttggttaagattggtatcttgaatcaggcgccttagaccgctcggccacacaaccatattaattgtaattgtacgaatgattgcttaagctgactatacctcagtggaaatgtcaggtatgcaaccgcgtttcggacattatccagtatcagagtttccgtctcaaattagaacctcttgcagactgctcagcttatatctatcgatactaagggaaagtatgtgtcatacaccccgtactctttatcgcaatagcctgccattcggaaattccaacttactctaatgagacgtacaaagtgatataaatttcctgccaattctgtcaccgtcatgatggttgagtcaaccgctttacggtgaaaaagaattgaattattgacttgatatatgtataaaattatcagctaaggcagtttatctttgttttggtcgaaggttcacacatctgcttcttcatacgtttatcattatcaagctttgattacttttataccaaaaccaattaacaacgcggtgcgggaaattgctgtcaaattgaagaagaattatgtccagaaccatacttaacaacatccaagaattgccaggcgatgctttattcgctatcaaacaacgtttagctgaagaccctagatctgctaaggtcgatttgggtattggtgcctatagagatgaggatggtaaaccatgggtattaccagctgttcgtaaagctgaaacattgatccattctgacgcatctttcaaccatgaatatttgggtattgccggtttacctgctttgacttcaggtgcagccaaagtgatcttgggcgatgattcatctgctttggctgagaaaagagttgtttctgctcagtctctatccggtactggtgccttacacattgcagctaaattcatccaaaagttcttacctgggaagttgttgtatgtttctgatccaacctgggctaaccatgtctctatctttgagtcacaaggtgtcaaaactgctacgtatccttactgggatgctgctaccaaatctttggatttggaaggatttatcaaggctatagaatcaagtccaagaggctccgtgttcttgcttcatgcttgtgctcataatccaactggtttggatccaaccgaagctcaatgggagaaaattctcagtgcctgtgtgaagaatgatatcatcccattgttcgactctgcctaccagggtttcgcatctggtagtctaacgaatgatgcttttgccgtcagacttggtgtgaagaaattcgctgaatctgctccaattttcatctgtcaatcatttgccaagaatgttggtatgtacggtgaacgttgtggatgcattcatttgattgttccaagacaagaatctaacgttaatgtttccactattaccaaagctgttgcatctcaaatcagtaaaatcaccagatcagaggtttctaaccctcctgcttacggtgccaagatcgttgccaaaattttgaacaatgctgaattgactgaacaatggcataaggatatggttacaatgtctcaaagaatcaccaaaatgagacactccttacgtgacaagttactcgagttacagactccaggtaactgggatcacatcgtcaaccaatgtggtatgttctcttacaccggtttaacaaagccaatggtggaaagattagaaaaagaacatggtgtatacatggttgctagtggtagagcttccattgctgggttgaatgaaaagaacgttgaacatgtggctaaggctattaatgaagtcgttcgtcatttcaatgaatcatccaaattataaacattcttatctcaaatctttgtagcatagcagaaagctgcaaatcgtatgcaaagaaaatgaacagtattccttcctataatatgtaatgtgatttatgtatacgctccttaagataattatcttcatactctctccgataaccgaacgtccagattcaacgtctttgaatatctgtatgtaaaacgtgctctcttatgaaaaggcttgacaacaaccctaagatactagctagcacggcaaaacctagtaccaacctactaccgccttggaaactaatttttgccagcgattctaagagtgggtcgaaggatacatcgaacgaattgttttccagtaatgtctggcaccactttctcaattggtgagttgagtatttatcattcaaggttttgttttctacaatgttacgcagaagagatgtctgtaatttggattgataaattaatccagcaaaagatacaccaagagttgagcctatagctctgaaggcatattgaatggaggtaacttgtgcttgatgtgaagtgtcaacactagcaattaaagataacagtgttattgttaacatactagcataacccaatccgggtaggaataacatgaagtactccaggagaccttttggttctgtgttataggtcgataagtaaacgataagagtacccgcaactgtcacagtgtttagtgtattggacagtgccttatatttgccggtacgcttcatataaagaccggtcatcatagaaccaatggcaataccgaaaaagttagagactgtcctgacaccaatattccagggtttcaaatgatatactgtttgccaaaaaacaggcacgtagtaggctaatacaaatgtactcatggtgaaaaaccaattggtcagactggaagctaagacagtacggttcgatcctagaagccttattggaaccataggattatgaactgatagttcagtggaaacaaaagtataccctgccagagccaaaccgacaatgaaaagggcccaggtaccgtaagttaaatgagagggattatccaatacggataaaatgatcattaataataacatggtagtgattaaagtaaaactaccagtgaaatccacatgttctcgcacatcggcagtggttatcttcttgttggacaaattaatgagcccacgacctggagaacccgcaggtaaattcaaaaacttcatgattaaggaacagcttaataacgaaagtggtacttggcataagaaagcccatctccacccgattctctgttgcaaaaatgcaccaatcaaactacccgaagcacatccaagagcaaatacaatatttcccataccttggtatacacctctctgtctcaatggaataatatcactagtagtgatagtactcaaactattcaagccaccaccacctacaccagcaataaatcttccaatacataacatccataagctcttcgtaaagggagcaccgcatagaatacatccgaatccaaaacacaaatttgaccatatcaacaatggtttcctcccaaagacgtcagataacttcccatacaacggctggaaagcagagcaggataataaatacgaggttgcaatccatgacatctgattggatgcatcaagttctgaagcaatcgtaggtaaaagagtagttacaatggtagtatcaagtgctgctagatatgatccaacaaataatgcgaatactatccaattaacatctctcagcggttctacgtttttgtcatgtgctgcttggtcaggaagctgtggcacgggtgataacaaaggctgcaattcatcagtcattagatgctggtttgatgacttattattcttcgtttggctgttgaacttcttgctggattagtatcttaatttgatacagggcatgtaaaaatcatatcaaatcgaatggctatgatatttataagtgaccaaagaagaaaatcggtttgtattttgatcttaattgcatctgtaaaaacaacgtccaactcggactgctcaaactccaatctaatcttatctgatctccctctctctttctctgcataagatgggtttaaaccaaaataataatcgccgtacaagtctcatgttcggcattcagcttgacacaatttcctatttgaggactgcaataccgagatcacgtgccttcagtcttcaactgactgaagattcatgttccgagacgttgaggttatctattggtttagcgagaaacaaatccatatgatcgttccaattctcagagacgcccatatcaaaggaaacacagtacttcttgtttttagatccaaaacccttttaacagccaaggtggacgagatttactctgaaagagaaagatgaaatgttgaactgtccagacaaacaaaaaataggaatttttcgaactgaaaaataaacacatacatacacacaagccaagcaatgaactgtggtgacaaagaaaggaagttttgagtacccatcaactgcatacaagtggtgtgctgaatttatttactgtattttaccattgatagaactgagtgtacttttttggggtaattcattgttaattccaatactaggcactaaaagtaaaaaagagtgcagaaacgtaaagggacggaagccaatataacctactcagtgacacgtaaagtagaacagagttaatcataatagaaaatatgtcagtcgatattcgaaatcgtactattgagttccagaaacgatgtgcgatcatatccaagaagaataaggccaataatgcgtctgttgcttcaaacaattcaataccaaacaaatctgagttccaaaaaaaagcatcagagatagcacatgagatcgcaaacacggctgtacagttgggcaagctatcacaattggcgaaacggaaaccgttattaaatgataaccctgttgagataatggaattgacgtttctcattaagcgtcgtatctacaccatcgagaacgaaataatggaattgaataaattacagattggcactaaacagcataaacagaacgtgatgacattgctcaataccaagatgaaaaacataagtgggaatttcaaggatgttttggagacaagacagaaattagagcttgagaatcaggatagattagaaagattgacgcatgttggtggatcagataacaaagattcaacaaacaatacatcttcattggtacctgcaggagccagcagcaacattataggacatggttacaataatgtgaatcccttcataagcaatttgattgacgatgagaccaacaatacatcttcttctgcgaataacggtcttacccttcccgccaacggtaatctattactattagaagaacaacaagatcagagatatctacaggaaagaagtaatgctattgaaaccattgagagtacgatacaggaagtcggtaatcttttccaacaattggctcatatggtacaagaacaaggagaaacgattcaaagaattgacgataatgtaggagacattgagatgaatattcatggagcgcagagagaattactaaaatattttgataatatcagtaataatagatggatggctgtgaaaatatttgcgattatatttgtatttttcttgttatgggttttagtaaactgaatactagaacgattatcattattcgtctttgaaatagattaatcacagttagtagtaatattatatagatactctatatcatacacatttaaaactattcaccggaaaggtaaggttaaatgacattcaatatatggtaatagggaaattaagggagagaaagataaaacgtataacatatgcacattttttgttttttctacaatcccatttcagcttgtagttctcttaatgcacgttcatcttcatcctcttcttcgtcttcctcatctgcttgggcactattaagttctggagtagataatttgacgtcgggtacagacggtaagtctattgaaggttgttgtatttgttgctgaggtacaggggcaatgtgttccttttgcaagttttccgattctagcagttccaactcctggtctaattcgtcctcgtccaactcatcttgtaatatcaacggtttagaaatagcctcgctgatttcttggtttagttcaacttgttctctgatttcatccatagtatcatccactttatctagatctagccccttatggatatttttcattgcagatgcaccttgtttcattgccttcaaagtttccaaattcaaattagcattttctatcgagtaaagttgttgatccaaagaatctatctgtgattgtagtttgtcaagctgtgattcataaagcttcttcttcttcaaataagtcttcgcattattcttattaccagattgaagacttttctttgcaagttgttgctgctgatctatctgtgtttgcaaatgcgcctgtttcttattcaatagttggatatgttctctaaggtcgacaatcgccttcttaggcagttctttctgttgtttggaagttccgaagaaatagccccacatgatgtgtctaatgtattcccgtcaaatctgagcctaatgccacagggtttaaaaaaatagaagatgttaaaattatacctgagattgccaggtgagtctatgaatatgagcccagcgcctcagtctatctttgatagtagctgttcttctttcttacttattgttaatccaatattgttcagttttttatccgttttaatttcacaatttcagataggataatcttttttgggggggggggggagactacggcggcgaacgggggagatgtgaaacttcattacccgaatttgaacattccagttccatatcacgtgatttatattgatcacgtgatagatcttttttcacattgtagtttcttcttctcgccaaaccagagaaactcactatgccccacctagtcaaaagggatgagttcatatcactccgaacggacctttccacgatccaagcagagcagttaccgcggggtagcaccggactaaagcagcaggaatggctccataccgtgagcaatgtatatactacatagcattggggccattatctaactgctaactgcatctggtcctggatgagtaatcagtcacagatccaaaagattccactatggctctcgcttcaatgctaaatcatgctcttcaacatttctctctcgtaagctcacaaagctggacctggtaagcttagtctgtaccccgtactatagccctgcgacaatttccccctatctgcccccctttctacgccctatcagctctttttttttttcctctgctttccctgcctgtgtaccttcggctcgggaacggaaaatgatagagtataattaaacacccatacaccactgtcaaattccctagacaatctcggagtgaacatggcaccgaggcatataaacatggaataaaacaatttattcactgtaattccattttccaagtttttttttttttctagtgtttccctgctttgatttacttgaatttttctacacatttcagttttggctatcatgtatatatgtggttattatagtgatcatcatatggacaaactttaactatagtgtcacttagaacccttgaggattgctaacactgtaaaaagggttcatctgttaagatactgttgtgtcaatactagacttatcatatacagtaaaatcggttgagagccaattttcgtggatagatcaaattatagatccattttggctattctcaattgaaagtaacgaataaagagttgggttaagtcattcccgtgccaaatatttattcgattggtggctgatcctctactataaactaattttatttttacctctcggtttctattacactgtgaacggattttctcggtggcctgcttctattccccataattttctggctttgaaactctttcgtttgatttatttaacctttcaatggatcagcagaggatcacacagcagactcctcaatggagcatacagagcggtgccagtgcacgtgctatgaaaagtgcgtcgcatgctaggcttacgaataaccagcaacagctggaaatcgaatacaagaccatgaaacaggaaaatgctaagttgaaagaggttataacgacgttaaagcaagaaattgacttatattccagagtaatgtcgaggaattcttctcaggttggtcctactacggcaacgataccgctgcagatggaaaccttacttgtgaatccaaaacgtaggaaaactatgtgtttgggaagcagtattaaaccttgaagcatttcctggctttttttttttgtgttccatatttatccggtagtttccttcactaggaagctgtctttccacaatcctctctttttcatttccttgtttctctctccaggatacgttgtttttcctgaattgatggaatagttaccagtttttctaaccccggcactcgactgatttcacgtttttatgctaatgatttattatgttctgtttttttttttcattcattcttatgggccccgccttcttaccctttactattaacttacgcatgatatcagtgacttaattagcagtttctcttccaccattttaaccctcggatggaaccactctggtctttttattttgattggcaaagcgttccaaaacctttttctatttggcaccagccagtctcacacccgttaatttataatttataaatgtcttatgtataacgaatctctcacgacctcactctaaatcgaatattcctttaccgtttttaatcaagaaaattgttattcattcaaaaaaaaaacatcgatgttccccttaaactgttcccctctgataaagaggataccgattgtaagaacggttctagtggtttaacttcgaatagcgatggctgaacatcggtcctacaatttttattctttattggaatgagtttattacgtttattatggatttcgtcttggctcagttcttttgtgaaacgcttaacatcggatatctatatatgtatatataatcacgaagaaaagtagaatcaaaagtctatcaatatgcatcatgcatgaagaagtgagaagaacagtaaatcaattggtaaattgttctagtttaagtcaggggagaaaaaaagaacatggtcttagtttaatttgtttcggttttattttaacatttgcatggtgacttcaaacgccgcgaaagtggcaccgttgacaggcaaagaccgaagcatggtaggcatgaaccccttggtgaacgctctcagaccacgctctctatagatgttttttgcgacttgtaccacgtttgttccgtaagctgggttaactaatttatcagcttgcataacggatttgacaacatcgaatgggtaagtcatagcccagaagaaagcaccggaaagagcaccaaacatacaagccttccaagcagatatatcttctctacggaagccatgggctaattgggacgctatcaaggtttcgtaagtcaagaaatagataccaaacccatgagaagtcctcatcaaagtagcagtaaatccacgcatcaaagatccttgtttcaacaacttttcagtgcagtccaaggtacttttatattctgcattcgctagagcctctttttgtaattgtaatctaattctgacatgttcaattggagtcgcgagtaatgcattagcggacccactaacgaacccacacgtataatattgaccaagggataatgtgttatcgtaaataccacgtgatctgttcaaatctctgaagtatctcttcatggcttcgttaataccgaactggcaagagacacaagcgccgacacccacaagtggagccatagttcctttatagaatcccataaatccttcgtatttgactaggtctgtgatcgcttcccaagcagttgcgttccctggcatagtttgtaaccgtactttgatgatatcaaatggttgccccactagaacttgagctaccccaccaacagtacctgaaaatacatcctttaaagttttccgaaacccatgcaaatcagtcaaatcttcgacgacttgaggagtgatcaataattcgtcagacataatattagtatattttagctacaaccactgttcttcaatggtatctcagtagatatcaagatttattaccgttcacctcatctcatctcagaaaacagctgcaaaaacagtgaagagtaaaaagaaaaaaagcagtactaaaatgtaaacaacatggatacaagagggatctatagaattcacttatatatatatatatctatatattaaacatgttcaatcttcaagcaaaccatatgagttaaaaagtaagagtaaacacccaacaaaagaggttagaactagcgaaagctgaataatcgctgcacatcgaataaaactcccggctacaagagataaagctaggacaatctgcgaataaccgaaagtagcatgaagacaagcaaagagcattagctcattatacacattaaatccataatacacaaaagagagaaattgaaacgcatagataaagttgtaataaatctaagcgcattcagaccctaaatggtttcacattgatatggatccagaatcggatatcaatagccgttgatacgcccagcactggctgtgaggcgttgctgtatataaaagatttccttttttttccttagaaacgttaacttcccatacaaaacttacttcagaaacaacttactcgaatcaggctaaggatgtgcttttactactacaaaataatggacctgtctttccagctgtcagagactccgtatgtttttgtggcacagacacaaaaaaaaaagaggtcttgagataaaaatcttggatttgcttcccgttctcatttttcagggggcgcatattaatttccgcttctgactctcgaggttgtttttacctcggtaggactttaatgtgcgcctatctcgatgatagccttgttttgatatgttttgttgtcgctcacgcatatgagccgattggaagattatattacccggataaagatcttgtccattagcggaagctcggttccatatgctggatttggagtaattttctcacagattgagtagagatggcgctctcattagagatcacgtgattcgatagattgtgtactcttaacctgataattgcatggaagtatagtccgacctgacaatttcatatctccaaagaagccatggttccactggttccactggttcggttcaactacaaaacaaattagacatctctcccatttaagaattattaaacaattatgctcaattgtagtactaaaagctcctatgtacgtttgttcagggtctctctctcattctataatgctcatcatgtagaaacccagcaatgtgcatccgatttgaatgacagtagttgtgatctcttttcgtcttgagttggtacttatatttagtaattctggtaccacgccaactgtgctcgtatagatgaaccctccacatgttataatcatgatcttgttggtccattcctcgttgttgagttcgtcattacctttgcccatttcatttaatatacatccgatggcagctccagtcaatgatcccaagcatgtaaatagctcagattcgatagcttgtttgaaagtcaacccactggatagttttacagcaaagtctcctaattcatgcggaacctcgtgaaatacaacggccatgaatgacattatcccaacgtattttgatgtgtagaacgatgaggatactgcgataccatcggcagccttgtgtataaattcagtaaccatattgagatacgtacttacctccaaagacttgttattggtcttgctcctggaactctgagtgccagtaggcttcttatcttcctctgtcgactgtttcaagtgatcatcgtcgaatgtgtgtgtgtgcgaatgtgagtgcgaatgtgagtttggactgcccatgttgatcaccctcagtagtttatcgatcgccatgaaggaaaggaacccatatagaattccatatccaatatcaacaggatcgccctcatggtatagctctggaagaacgtgtaaaaatacgtcccctaagattcctccaagagcgaatggaaccatgagtcgaaccattttagttccacctcttttgaaccccggtattatcgccaccaagatacacggaagagcacacaaatagagggtcgcgagcattgcattgtattttgccgagaatgggaacagcagttgcagatattgaattacggcaccgttgttcaattgttggaaactattctggtgtacgtgatcatgaccatgtgaagtaacatgatgacttgcatgtccatgtgcttgccttaatcccaggctaagtaccgttaatagtgctgcttggatcatagtagttttttactcccagagccactgcggttaaaaccaactgtaaggtgaaaaccgatcgttagtagtcgatgtttccattgttggttggctccatctaactatgattctttttctatcaaaatgatgatggtcgatcacgtgactcagatatgtctgttttttcccttaaatgaaaaacttaaatgagatcaaccaaaacctcgaggcattgacaccatcagtgtggatatttgagcatacttataataagctggctcttttgcttttacttggatatttgaattcataagaaataaatttccaccacctgatacaatgccattgaacgctgttagagttgcctcaaaggctcaacctgcaaagaacgtgattcttgtcttccatggcctaggtgactcaggttcgggttggagtttcctagctgaatacttgcaaagaagccctgcttttgcgcatacaaggtttgtgttccctaatgctccaaatatgagaatcgatgcgaatggaggtatgtctatgcctgcttggttcaatatttacgactgggcgaatccagatgccagagtagacgttgaagggattaaatcttctttgaaagtaattaacagtttcattcaagaacaaatcgatgatggtatctcacccgaaaacatcattcttggtgggttttcgcaaggcgctgcattgactttagctagtacggttacttctccttataaacttggtggtttctttgcactatcaggattctgtcgtttaaagaaagaagacttagattcaattgccgaaaataagaataaagatacaccagtgttccacggacatggagaccaggaccctattatcccaattcaatacggttcagacgctaagaagtttttcgaaaaatatttccatctgtcagattatgatttcaaatcatatagaggcatggctcactctacttctctagaagaaatgcaagatttggttcaatttttgagcaaagctttaaaactttgatatatcaatttcgtcaatagatgaagcttgaaacaagcttgagaaagcatagccttgaattaatgggctacattgtcattcaaagaaaactgttcttttttaaatataataattctgcctgtatttactagtcatatgcacctcaatgttttggcaagtatatcaatatagaggacgccgtggccaggtttagaggcgcatgctactctgctcttctatctgatcaacttgcattacattttacagtcacttctgacgtgtccgttgccattcattgggatttgactgtttggttaaagacacttttaatataataataacaaaatatataaaattataaggtttgaccaaagaatgatgcatcagtaccgagataaggaagaacatcaagacaaactgcccctctgaaacttgacttatcggcatagaaaaaaaacagccatgtcgttgccattgaggcccttgtctctagatgtgaacacaaagcagctagattctaaacagaagaagttccaccaggctgtggaaagggcattgcaacatttcgatgctgtcacggaatgggctgactatatcagcagcttaggaaagcttctcaaggctttacaaagttggtctcctaaattccagaatgttaaatactacgttccatatccttatcaggttgctagaagattgtcttcatcattatctccaaacttaccttcaggagttcatttgaaaacattagaggtttataattacatttttgagaagattgggcccgacactttggggaaggaagtgaatatttggataggtggcgttctacccttgatgtcttatgcgtccatatcggttaaacatccattgattgaactgtatgagaaatacattgtaagtctatcttctgttacgttgaaaattatagtgaaacctgtgttggcaagtttgttcccagggatcgacgacgaaagtagtgagtcgcaagcaagtaccataaatttgatagagactctttacactaatctagatgatccctctttattttggcaaacttctttcattattataatcaataataaagatagaagattgggcggtctagtgtggttgacgaaaaagttaccatcgttaaatgcagttcctcatttagctgcaaaggaaaaggacacagctttaactaaaaaggattcgaaggagaggaaagaatttgctttgtcgttgttactcgatgcctccaaaccagtagtttcacccgagccaggtttgctaataagatcttttgttagatgtcttgaagatgagaacgaaatcctaatccaaagaggtattttggacttacttttgcaaaggttgcatttgcattcaccattgttgcaagtgttagttaaaccttccgactgtcggctcttaatcatgacggcatgcagaacaatgttgaaaaaagacatgtctctcaatagaagaatatggaactggctgcttggaccagtactagatccagaatctggagatcatagcgattccgagtattttatcaagaacggtgctcaacatttgttaggcggattgcatgagatgctcgaacaccctcagacgtgcatcgatgcttacaaaatcgtgtctgcgttgatggatcgctggcaaattggatcttatttaacaccgaaaatattcatcccacttatcgagaaatgcagagagtactcggacaatcaattagtattgaaaacagcgtcttctttctttgattctgtcgaaactaatatcatttgggggaagcttttcgaaaaagtgttttgcgataatgactatgaccttctaatatatgtgctacaaaatttccgctgttccactgatgaagaaataacagtacgtcacttgccgctaattctactatcgttactatgtcagagttcgattgaaattccaaagtgtactcaaatattagaaattcttgtacgaatgatacctgaaagagcctacttgcccattcatcactcttctttatcccagggaagcacgctatcctatgagaaatgctttactgatatcaaatcttactatgaacaggtgtcagatcctcttaattccaaagatctaaattcgtcatctgatttaagtcctcctttcaatacggcagatctaacttttttaatcacttatagagtgcatttactgttgatcgaaaatattcgaagatatcaaaacataaatgatatttcgaaattgtttgtattattcattgaaataatccccgagcagtatgatgtatcagaagaagctgaagtggtgaagtggtcagatactgatttgatagagtgtatctttgaacaaaatgatgcaatcgaaagtgctcctgaacagtcactacaaggaattgttgagatttacactaaatatttgttccgtaatttaccgatattggattcgatgcgactattaaagataattatgaaagggctgtggtcattactcttagatcataataaacaaattgacgcagtcgaaatgctcaaagtcataacaagacatgttccatcgtcaagaattgaaagctgcttagcttctgtttatttgggggattgcgacattaacaatcgtctagttgttctagactgcctctggactcatctagcaggtaactttgatattataaaaagacctttgtccctagctttggacgaactttctgatgaaaagaattctaactactggtatgtgcatgaatgggtggtatctatcatttctggtgaatccggaaacaagttctttgaacttttggttgaaaacccccttcaatttgagtttataaataacgaaaagattggcaatatggacgatttggcgctatttacttatcatcttgatgttttgagaaatgttttaaaaaccccagacactgtggtctataaagctttcggaattcaattagtaactgaaaaattatccaaggactgggcggccgaagacgtatcgtcatataaaagcttggttattgctgtgctgctaaaatttctaagtatccaaaatgacgcacctggcaatagcataaaaagtgcattatctcttttaagtttgcttgtcaacggtactgaaataaatttcaagaacattgtgacgagattgctccaaatttctacggaatacattgccagtaaagttcctgattctcaagttgttgtcgtatctttgctacaaataatctcacaggtgctatctttatcggataaaagacaaattaagcttgacatctttaccgaggactcttcgcatatgaaatatgttgattttcttgtatctacagtaagtcatattgatgatgacttagtcttttcatcctatgtcaatttactttccgagagcattgcttacttccaagagtcaatcctcaagatcattttgcctttgtctgcatccatagttgactccatatctagactttttgaagacgagcagaaaaggggtaaaaacttgaggtctataactgctcttctaggatctttagaagaaattctagaagtgtcgcatggctatttgcaagctgatgaaagcaccggttatttctctcacaccaatgcaagaaatgattttttgcagaacatggtatccaatgtgttttcatcggatcaatcctcttctgaagcacgaattttaaatgagagaatggtcgttcttaaatcttttacaatggtaagcggcagaatatcagaaatgtggaattgggctgaccaaacagcatctggagacttgaggacggtcaataactcagagtttggccagtcattacacgaagtttcgacaaactacaaagttatctcaaataagctacttgaaaagcttttcctattagaaccatcagatattttggaatccttaatttcgaacccaattccttctcagctcgttagactaaatcactctttggataacggacggtgctcagtgacaatttcccgtttgctacaaggtatagtaacgagatgtaatgagactagctctgtgtctttattcagcagtcatagaagcaaaaagaaccttaactctgcagagacaaatcaccttggcgcgggggatttattatcatatttgctcaaatattttgactcgttggataattcggcagttgaagacttttattcagattttatggttttcttaaaggaagttttgagtaactatactagctatagttcaatatcgtttccgttattgcaattaattgccttaatcagcgaaaaacttgactactctagtttgggtcaagaacgccgagtcagaaaggaaataactgaatcatttattaagttactaaacaatagtctcagctcggatattatggatagcaacaataaagaagacattatagcagctttgtattttgttgttgagaggctttcatatgttgtcaatgaagttaatcaaggtgataagttcaacagcactttgacctccattgttatctattccatagtgccttacagcaaaaggatagcagaaatctcccccgatgtattgcacttcatgaatttgatagcaccaatcggagagagagttaaaccttggaaattattccttaacgaatttttcacggattctaaaacgttacgggcgctgttagagacagatgacaaatcttggagtttcatattttaccactggtctctatactacgatagcaaggagaaacttcttccagatctaatattgtccgtaacggcgaagtcgaatgttattacaccttcaatcaatccgtttaacacatggagtgattcagaagttcaatccaaatttaacaatattctacgcattgcgtatttggttctcatttctccgaaagatcattattatattcactgtcaatcacttttgaacattgttgaacatttcatctttggagtagagaatgcattacaagccgctggatatatattattacgggctttactattgaaatttacaaacacacatttcgctgatcattggtcgatgttattctcaggtttacaatcatctttactcacaatatatgaagctatacaagttcaacaatccattgacagtaatgttgtccttcaagtatcgaagactcttgatcttcttctaaccgttaacgtagaagaattttctgccactcatgagtggttattcgtcattgacactattaatagtatttacaagaaggatccttatgtcgcgctagtagacgagataagccaatgtaaagatttggtaatggtcacgacgtcgggtgttacactgaatgaagatactacattccgtgttcccttgctagtcaacatacattccattgacagcgttgtaaacctcattcctttcttcttcaatctcagttacgatcactatgaagcgatgtacaacttaaaccccttgaacgaacaggtatgtattgatgatttatcgcatgacatttgtcatcaattcattaagtgatcttcaataaatattttcatttaagcaatgagaagctcacatttgcgttcatcagtttctataaaatttataaacacttaatacttcccaccctgcttttctgtgtatcactaattcacttttccatccgctgaacttcatcttacttgccacagtttcaggtttatttctagcacaaaacaatatgtacgctactccgttgcagctaagaattctgtccaatccattcaatagtctctgtgtgaccaccatcccatcatcaccaccatccaatgctagaaagagccactcatcatcacgaacagcatgatttgaatgaggcagttctggtacagtttctgcaggtacatatggtggattaaagacaagcaggtcgacctcattttcccttattgaagacgtaaggtctgtttgtaatacatcaaaatggctattcttgcaaccattcttcgaacaagtgtctaaggtagcgtccaatgcccaagggttcaaatcagttgccaaataaagtccattggcgtttggtataccattttgcataagaaacgtagagactatcccagaaccagaaccaatttctatagtcaatggtactgcgtcattgaacctgttattcaaccaactcagatcagcttctaatgcatctaataaaagaaaagagtcctcgcttggctcgtatactttattataatcataagagacgtatggtgtagctagcatcgccctgttatcctaagccctgatgagctatagctcgcatcaatatctgttctgcacctgtatcttttcaaacatggaagtcatcgcatatataatattgtatttgaaaagttgatattgaacaataacgtatgcaaaaggtcatctaaaagaaagtaattaaattgaagcttaacaactagtctactgtttgatacaactattaatcaccattttcagagaatcgacaatcagttgcttgtttgtggttgagaaagatgcaattaaaggtcaagacattaacagggaaggaaatctccgtagatgttcaaagttcagaaacggtctatcatatcaaagagctattagaagaaaaagagggtattccaccatcacagcagaagttgatcttccagggcaaacaaatgtatgttaattaactgataattcagaactgagaagagtttgatatcaaattaatgtagggactcttttactaactagtaagtaatgctatctttaaatcagagatgataacgcaacaatcggcagtgccgacttgcaagatggatctcttttacatcttgttctaactttaagaggcggttgttgagagccatgtgtcattgcattgcgaaacctcaagatacgtatgtgtataagtattttgcagataaatacctggaggaattactctgcatttaataaaacgactataattattggaagctaacactatgaatgacataatttacatttacacgaccgtccaattatcaaacaaaggaaggatgtaacacatgcttgttgcttttccttgtatgcatgaatgaaccttataaatacataatgattcagatatcaaatttagtgcgaacattataattgtagaaacagatgaacttaacgacaacgatgcaaacaaaagtaagaaaaacacggataacttacctgactatactgtaacatgggtgacaatagtttatccaatgaagccatcactgccgataatattttgaaggatgcctttagccaaaagaagcagattgcagctactacgaaggcagatatattagatttggaagaactgaaagactggcaacgaaggaaaagaacagagtatgagacagttttgaaaagaaataggttagaccttcgtcaatggatgaggtatgctcaatttgaatttgatcagaaagatatacgaagagctaggtccatttatgaacgcgctcttcttgttgatcatgggtttattccactatggattcaatacatcgacagtgaaatcaaatggaaaaatatcaaccatgcaaggaacttgttagacagagcaacaaacgctcttcctcgtgttgataagctctggttcaaatatcttttattggaagaatctttgggaaatcagggtattgtacgaggcatttatacaagatggtgttcatttgaacctggtcccgatgcatgggactccttcatcgagttcgaaacaaggtgcttgaattttgaaaatgtcaggaacatttactcgaagtttgttctagtccatcctcaaatagatacctggttgaaatgggttcgttttgaacaaactcatggagatatatcatccgtacgaacagtgttctcattcgcgctagacacactcacaagtttcagcggaacaccactggtagatattgaacgagttattggtagcttcgcttcctgggaagcttctcagggagagtatgaacgatctagaacgttataccgactagcagttgaaagatggccaatttctgaagcattaaaggaacagcagattcagttcgagaagaagttcggctcttcgaaaaatatggaggacatagtaatcgctaaaaggaaagccgagtacgagcaatatctaaaatcagatccctatcattattctacttggtgggtctatattgacctggttgaggaaaaatatcaagagcaattgacatcagctttccagtcgttcattgaattggcaaagccgaagtccctggtaaaggattcgagctggaagaggtacataagaatctgcgtacgatacttggtctatctagagctcaccattaatgatttgcctacgatacgctcggtttatcaagacatcctcgacatcattccacataagaagtttacattcggtaaactgtggataatgtatgcagaattcgaaattaggcagaacaacttgctgaaagcaagaaaaattctgggtgtgagcttaggaaagtcccccaagccaaaagtgtttaaatattacatcaatttggagataaggctaaaagagtttgatagagtgagaaagctatacgagaaatacatcgatttcaatcctagttcagtgcaatcatggttggattatgcagaattagaagaaaatttaggagatgaagatagatcaagagggatctatgatatctccatgagcaataatgttggattatctgaatcggaccagctgattgtcattcagcgctatatcgcttttgaaactgatgcagcagaatatgaaaaggctagagagttgtacgagaagtatttgattttgagtagatatgacgtgaacatatggataaaccaggcgcttttcgagagcactattccaactgagacccaactaatagcctatcaacaatctcatcaagacgggaattttgacgacgatggcgaagaggagttcagttttgaaattacacctgagaataagcatcacaccagggctatttttgagaaggcaatttcatatttcaaagaacataatgaagataagaaacgccagcaagttttacaatctctcctggagtatgagaaagttcatggtaatcaagaaactttggaaaaggtcaatgctagacaaccaagtttggttagggaaaaagttactatcgataacattgagcaagagtcatataaattggattttccggacgatcgtgttgctcaacctcctattgctcgaaatcttctagctttggcaaaacaatgggagaaaaattccagctgatatgtaactttatattcatatacagataatacaattgtagatttagaacacgcatttaatcaggttggcatataggctattgagaaaaaatacgaattgtattaattattcgtttcattatcggtaaaactttgtggcaactggtttgacggtatcgaactgggtgttgatatcgtagaaggggtaagcccaggtgcattcattgtcggtacagatcctgggggcattaatcctggaggaacgttgcctggtgctgctgccaatcctggtgctgccaatcctggtgctgccaatcctggtgctgccaatcctggtgctgccaatcctggtgctgccaatcctggtgctgccaatcctggtgctgccattcctggtgctgccattcctggtgctgccattccgggaggagataaacctgggggtgccattcctggagtagcaatatttaagtttccttcagtgatacctattccagacgttgaattttctgcagccagagattcggatctggctgaaacagaagaaggtgaacctacagaagagttggagcccgctgtagcagtaatcccatcacctcctagtccatcaatagaaatttgcatcataggggttagtctatgagtatttacgatagtgctttggtcgtggatgttagattctgcatttttgaatcttttggctgcgtcggaagcgacctctattccaattctctttcttccgaatgtttgtacatagttatcttctcttagtgtaccattcaaaacagcaagctctctcaactgacctcgcttcaaatcattttgaccttcaggtgaagtgatcgccttgacgactatactttcacaggccttgattcctaatggtattttgtcctctacatctgcaataatgatgcagtgcaatggctcattcatattcattgcacctttcggtaggtctgcagcagctttacctgatctgacggatcctcgtcctctgatggaaatcttacatcccgattcttgttgaagcttcttcaaagtattaccacgaggccctagtaatagccccacaaaatttatatccggataatcctccgtagggatgtaatatttgtcttgaaaccttgtaggtcttctatagtcgtccggtgtaacgaagtttggtatcattttcagagcaatctcaactagacgatgtctttcttcttccaattttcttttataccgttgttccttagtgttggttcttctaccacgagcatcgtacacaggcggtggggaaggggaccttgcccttccagaaggaggagtcaaatcattcgatctaagctttgcagtgatttctgcaattctgaacatcacctggtatgctgtctcatgttccggcgcgagaaagccattaattactgcaggtaatcctatttgttcaaagacggcattttcacgcgcttttgctccccataatgcatcatattgattatcagtacgacctctttccattattatgatacttagatgttactgctagcttaaaggcctccttattatgttattttccgtgcggtgagttaatgttttagttattcaaattattgtgtttgtaaatgtccaaatataagttactttgcttcaatggaaatgatgaaattgtagagttgagaaccaaaaatcaaaaaacaccgtagacaggtctacttagaggaggagtttctctgtaagttcaagtagactaaacgccatccactctagaagaattagaagcgcaataacggtaaaaaaagaggttatagttttatgcttacaagtaaccgaatataaaaaaattgtaaaacctatatatgcaaaatcaaataacctagttaaccaaagcagaagcagtggcggattcgtacttccagtttggtggcaagacagaaacagttctgtagtatctagccaatctgtgaattctggattcgatcaaaatcaatctgaatttagcatccttatcttttctgtttctttccaaatgctttctgacagagacagccttcttgatcaagaagtacaaatcttctgggatttctggagccaaaccgttagacttcaagattctcaagatcttgttaccagtaatgaccttagcttgagtaacaccgtgagcatctctcaacaagacaccgatttgagatggagtcaaaccctttctggcgtacttgatgatttgttcaacgacaccgtcggatgatcccttgaaccaagctggagcgtttctgctgtatggaatagcagaagaggacatacccttaccctgtttaaaaatgataattgttagtaaatcttggacaatcaaattagcaattaattgcttgctaaactgagatagaaccaagacagaaaagaaaagaagctataactagcgattatgaaatggaggtcggtatctaattatcggaactcgattctcaataatgaacagactattctccatcagaagtatatcatcatacttcttaaatcaaactagcttcgccataatctcatcagaactcatcacgatatattgatatcggcatactatcaatacatgtttttcttttcgactctgcatcacacacatatcaaagtgtgcgtcaaatgcttttaattgacgatgctccatttcttcagacttttaacagtaaagaaatttcaatgcactaccaaacatttctggacaaaagttcttggagtcacccagtaatataccctatcaaaagatgttttgattaagagatggttaagctgaaactgtactgggaatcattttcagtctctgaaaatgattcccgacggttttcatacgacaaccaccaatggcatataccggtagagatgatccgacagatagccctcagaaaacaatcacatcaaaagtctttgatgtgatgaacctgaagtagcttctcatcattttaagtccttattcatttcaataaatgaagtgtagtttattaacgtaccttagaatgcatacgacccattttgactgattttcttaacggtgttgattggttgctgtgatgtaccacttgaaatgcaataaattagatataaacattcaattgaacaattataaagtaagataacactgatatcgttatattaaagttatggaaggtttcaaacgttctcgagatagctgttctgaaaaatactcaaaatattctgcatactttattgccctatttggaaatcattatgataaattctttccttgcgaatatatttatattgatggtgtactggtgttattttggcagtcctggttgaactctgttcacgtgacttatgtttctcctccatcaagctgctacctcaagatcgatacaaacgatacgccaatgaaaggacaggtgtcacagtattgtcaatgaacccttggctcataaggagattgaatatgggttgtgaaataccggaattatatggcatacatctttaactaattgatgctacccaatttgtagcaacttaaagaaggcatgcaaaagtatgttattacttagcttcgatctcttgtttcaattcttctatatcgtcttcatcttctagtccggatgacacctcaatgtacttattaactgcacattctgctctcaccatttccaaagcacctgcatatagcatcttccattcttgtgataccacagtggctggtttccaatacagcaatacgagcggggtctttttccttccatctcttgtggtcattggataggatagaagcacaaatctcggcatattatcaggcagtagttcagccaaatcttccaaccggttgaaatcttctaaatcttcgtcatcatcgattatgatctcgtaagatggctttggttgaatcttgatggattggatctgtatgtcatccgacctggcagtcgctgttctgaattttttgatttgattcttagtttcattactaaaatgatatatagtcgacatgttccgttgaatcaatattcacctggatcggttggcttgtttgttttcccctgtattcttcaatttcgagaatacttcaacgtttgtaaaggatgggttacgtttcgctttcacctgttgctgttcataattcacagattggcttttacttcttgttatattatctatggattttcatttccctttgatctcaatgcaaaatataaatctggaaaatagtgctgtgattcaaaatagaaataagatcaataaaggtaacgttatcattactgctgcctggcgacagacttttttatattctatacaaagaaattcggttgaactcgtgacagtatttacaagttatgtgtggttcggttgatttcaactattaatagtatcgttaagtcgtaacattttacaactagcacacccaaggttgatacctaaagaacagggtattagaaaccatcgaataatgatgggtctttgtcgtaaagagacagtacgttgagtacctcctttgcattataagcagtcattgtcataatcattttactgtacgttttcaggtttgatggaggtgataattttacatgggcagaccagcttgagttttgcacagtgttgctatgatactgctggagttcctctttagaagagttgaggtaagatgtaagagaaagttctagtttacccaggttgaataattcgattaaattccttgccattccaaccgttcttggtcgataaatgtctatgtcggcacaattcacaacatctttcaagatggagaacagttttagaaggatctctctgacaagtgctgctagctctggatctctacaattcagcttgaaatacagaaatcttattattagtccaaataatacagccaatgttctgttagttaccagacaaataacgtgggaaacgacgaacttcgaaggtgttttcattagccttagactttgcaaacccattacaaaggacttggctatttccactgctgcagtcaatgtgaagaacaaatgactccagaatagtggagactgtgttctctcaaagtggaagaacaatagtgactggttcgataattttttgactttgaagaaatagccccacttgaatttattgaagtcattgaatatggagatatttattggcacacctggtagaatttcaatttcttgttcctgctcaatggagaattcgtacgaaggttgtgtcaatttaaacaagttgagtccattattctcattgatcttgaactgtataaactgttcatcgtccaatgtgcgctccatatttctgttactgatgattagcttaaacaattgataaccttttttcaaaatgtgcttaatctctaaattgtgtttccctatatcatctaaagatatgatttcttccaaagtctgtgaatcatccaacaaatgggcatcatcataaaacacagaattgtcaaattgatcatgcactgcaccacataaaagcatatagtgcaggttgttccaacaaacaagcatccacatgttcgaatcttcatctctgattgctacccccatatcattgatcatcttacaaagttcaccatcactccatccgaaaaccgaatacatatcatcgtgatcttctaataatagcatcaacctgaacaggataagcgtttgtacttgaagctgttcgttatcctttaagaaatggatgcaatgcgataagcatttaaggtgttgatcttcgatcggatattgtaaacaccatttaaaagacgcatgattaggttcgaacttcgtaaaatacgagaataacgataggtaacctaatcttagtgccatcattaaagttgtaaggaacttcagactagtttgtaaatcgtaatagtattgcctttgttcgataatcatctggtatagttgttcaaactcattgacgtctaaaattggatatgggccatgaacattggtatagaaatgtgataagatggttctcatcttatcttgtggaggcaaaaggctgagcatatcatcgatgagtttagttgggctgtcagatctttcatttcttatcttatctacgattccttcaaccgataacggttgcaaagcattgcttgcctctaatatgcaactgaaccaaagtgacgaatttgctggatcaagtttgatgagttttgatccagttaagatttgggatacaaggaaataatggtagaagggatctttgatgacataagaataaaactcgttggtggtttcaaatctagctctaagatcatattctgcaaaagaggtatgtacaaattctgggtcattttcatgaaccttatgagtttgttcatatcgcaagttatcagtgttaccgttttcatcaccattaatattattattattgttattattattgttgttgtgatggttctgatgctgctgatggtgttgattttggtacccgtgatgagataataagggatggcgagacatgtttgaaatgttacctggagatgaaaaggatgcgctaacggaaggtagcggcgctgagcttgaagacatagctgatgacgtagcagaatctggccctgatcctggagattgcgaagatatttgagtcgcgagaggtaaactctgaccaagtgaaacactcatattcaaaccaacgtccattgggccaccagatggtactgcgctagacgtttgcaaaaaattgagatcgaattgcgatgtgttttttggtgtgaaatgagatacgagaggaacatgtgatatacctggcaaagaggactcattcggtcgttgcaattgccgttgatgcaattgtggagttatcactgaactccgtacagaattttgtttcctatgcagtttttgctgccgctgtgtctccgatatcatatcattcccaatatccaccgattgtttaattttatgttttggcggcagttcgtaaacacaatcaatcttatatttaatacaccttgcgcaagtaggtttccctctatcacacttgcgccgcgtcttcctacagttctgacatgaaaaggacatctattggtgctattactattcgttttgtaaaacccacacacagaagagatgagtcagggttttagtttataattagttttggcttccttattttaagttttatttttttattttcttatttttttttcctcacttgtcttcctctgactgtcaatcttaattcaatccggaatttctgagctgagattaagtctaaaggtgaagatgaagagagagacaaacaaagatctaaatattgaaacttggtagatacgctctatgatcgtgttattgcactggagaaagatgatgctgatgaagaaaaggaagaagataaaaagtagagacaggtagaatcccaaatgcaaatgtaaatagaaaatggagaaacctgaatttgattcaaacagagatccaaaatgaaaataaaaatactggaagtttcaataaaaaaagcagtctaatgcgtgtagtgatttccttctctttctctctcaccttcctattctaactttcagtcttcgatgcaagaacaggatgtatcgaagaagaagtatggaactgaacggtattactattcaaaatattatatcgcatatatataaaccatgcataccaagaacgatctgggctaaatcaagtcttttatgttttttcttttcgatcgaacagatgcgaagagtagagacaggatggctaatgtccactaggaagtgttcgtataatttggctgtccatctatgactgattaaccctactattttctacccatgtttctctggaggtcccttctgctgaatacacattgctgtgtgtagtctacgttctttttggttttcttttcttttcagcaccttggattttttcacagtcaaaatcaggcttggtgacattccttataagagacttttctttctttgacaatatacaaaggtggaaagatatgcacgaaaaaaagaggggcagtagtgggaccagattaatgccacgtagctccagcgggcttacatgtttcattttaatatcttgtgctcttctaaccaatatatttgctccttttcctggccttgtacatggcaaccttcaagaaaaaaacaggaaaagaggaaccttatatgaaacctacgctatttccatggttgaagagagaaggcgggaaaaccaaaatggaagttaaaaaaaaaacgacactcaatatttgcttactttggacaaaggcagagttatctggtcaagtttaagcgagtgcaagaaacgcaattttaagtgcgacaatcagatggcatacggacatcgctatgatgactacgagattcgactcaacatgttcaagaaagaaaaataagaagggtccgtttcttttcttttgttgtgcttttattttttttggttgggggagggggaagggaaagggggggggtggaacccagttttcctggtgatcacatgaaagctatatgtatacagggtcaggaacaaactttttttttctgcaaaatacagccctacgcggcaattcatgctgatggttcctggaaatgtgtaaatactaacagcgttgtgccaggaatgagtcataatcgtaagagcagaccgttcccagctaagcacgtgcaatgcaggtgagaactttgatcactttactgacccgttgcagtgcagaccctgccaagcctgttcatgtcagggtatgtacacgtaataataccagagtattctgtgctcgttcaaattcaattgtagtaaataactgggtgtcctaaaaaagaaatccaaaacagccgagggcatgtgttttttttttgatccaacagtggtatctagaacttttcagtgtgacatatgccagccccaatagaaaaaggcgtctccgattaatgtagtcatgtatccgggtaacattgaaaatggagcttatatcatcatctatcttcgtcttctgtgtactttgtccgggtaacgttgtgcggttggaagaaaaacttgagcgaacttgaaatcttcacataaacgacggaaggcgagggaacaccttcattagccgcgtcccaacgcggctagtagtaatgttttcggttggaaatgctcctggtggttcaaactacctggatttgtgaaagagaagacggatatacgtatcggtccgtcaattctcgggtataaaaagtgatctccacggattccttttgttttagagctccgtgcagcagtgaaatttttcatatttctaaatacgtgccgacattgtccgtcaattcgggtgagggagtaaatccgagaaattagtaatatttcttcgttccaaatctgagttaaaaaaaacagccattcggggttaatttctgctctccagcaagttaataacctaaagacctgggctacaggcgtccttgcgtttggaagtaatatccactcaaactcaatcgtttcttatagtgtaaaagatattctggctgtgcctactttgggcttcagttcgcacacagcattgctcagtttgatccataggaatattcggtataaacagttacgtttcctaaacgtgatttgtctaatactgccatagatttcatcgtatatcatccaccggtcaaggctaaaaccctctgacacatatcgcatttctaatcaaaaccttttttttctgctgatatccatggggttttaacgagaccttctgtgttgcgcctttttttttcaatttttctatactttccatgtcttgctgtcgaagatgtcaacaaccgtttgttattatttgcatttttcaatgtcattaccaaaaaaagtcagtgcctatattatacatatatatatatatatatatatgtgcccgatgaatattaattcttgaagagatacggggggggttacggcatgaagcattaagtttctaacgtttcgaggaattagaaggagacaagctcaggtaaaaaaagacatctcctaccatatatatcatcatgtcaactaatcttgacagtggtgcttcagagcacgccgtacaggctcgcgcatcaggaaatgataatgtgtcatatagcagctccacagcgtcgtcatcagatgtcggtgctgatagaccgttccgcggtgacgatttggaaaagggcccatctggcagtggtactgctgataatgacgacgttgctctcaagttggtcaaaactttcacgaatcctgcttcggaaacggaaattgctgttaatagaagattgtctagaatcttgacaagtacagaagacgaaccagatttgatagaagtggattactctgatgttccaccaatgggaggtggtagaccttaccctaaagctttgcccgatagagctccatatgaagttacgttcgatggtccaaatgatcctctacatcctttcaactggcctttgaagaagaaacttgtgatctgtataatgttgggtcttgactgtattgccatcaccatgggttcctctatctttgcatctgcagttaccactatttctgaaatatatgaagttgccaacgtcgtttctattcttggtattactttatatgtccttggtttcgcagcttccccagttatttacgctccattatcggaattatatggtagacaaggtgtgctattgattgcttcgtttggtttcgctttgttccagtttgctgtagctactgcagaaaatttacaaactattttgatttgtagatttttcggtggttttatcggtgctgcaccattagctgtggtgccggcttctttctccgatatgtttgacaatacacaaagaggtactgccgttactatgtttgccttgggtgtcttcgtcggtccaatcttggctccagtgttcggttcttacattgtgcaatacacctcttggagatggactgaatacgttactggtatttttgcttctgtcatttttgtcctgttatgctatttctttgaagaaactcatcacccaactattttggttaataaagccaagatgatgagaaagaagactggtaattggggtatccacgcagctcatgaagaagtcgaactctccatcaaagatgtttgtcaaaagactatcaccagaccaatctacatgttgttcactgaaccaattattttcttgattaccgtgtacaactctttcgtttacggtattctatatttactattggaagcctacccaattgtctttgtgaaaggttatcatttctatgccaacggtgaattgccatatattgctttgatcatcggtatgttctttgcagctgttgtcaatatctacatggaaaaggactatgttagaagggttatagccaatagtggtaaacccgttcccgaagcaagattattcccaatgatggttggtagtatcatcttcccaatcggtatcctttggttctgttggactggtaactatccaaataaggtccactggatcgtgccaaccattggtggttccttcattggttacggtttaatggctattttcttaccatgtttcaactatctaatcgattcgtacttgttcttggctgcttctgccattgctggtaacacttttatgagatcttctttcggtgctgcattcccattgtttgctggtttcatgttcgaaaacatgggtaccaactgggctggtttgttgttgggtttgttcgccgcttgtttgattcctgtcccattcttattctacaagtacggtagaagactaaggcaaaaatccaagtacgcttacgacctacaataagctgaatctaaacattcataattttagcgccaatgcaacctactgattgttattcttccaggacaatgcgaccgtcgaactgtgcttttttcccacgttatatttacagcttatgtttaacggggtcctcgagacgaacaaccaaagaccggttaagaaatcagaatcattaatttacaaatgcatgagatctatctcaattactgactatattctacttaatacccgatagtcaaggaaatgttttttctttgctatatcataagacacgtagattttgtaaagcaccttttctcattataatttccttcgaaactctcaatgttgaagaagtctggttttggataaatgctcttcattaactgaactgacttcgacatatcttttgaacttaattagttcattcagaactcccctaagaactacaatatttcgccggctatttctgagcttattcaactcaatcacggaagtaatactattagttattgtgttcagacgatcaagagttttcaattcatgcatactgtggatactcggttgatcaggcaaggtatacccaggaaattacggacaggtgctgaccttgtttatgaggcggcattgaccgggaaaaaaaactctggttattccaaaccaccagactagttaaggtaagaagttttgtttgaaatgttcttcaagatagtacaacgtaagtcttctacatagcttcaatataagcttaattgttctcgagtctaacccttatttttcggtatttccttgattaatacttgactttaacgaattttgtccttctcatgtttacgtgccgcatagcaatattcttgcctaaatgttagtggatacatctttgttcatgctacctagtggtaagtgaaagaaccagtacatagggaatccatcttttaattgcaaattgtgctgtcaaataatggaacattacataatcagttcatggacttgtgatgagcttaggaattttcaaagaggatacaaccacttcctatagcgaaaaagagcactccgataggcaaaattatagacagtacacatgccgacatttaccgggtgttatgatcgttcagtctcagacaccagttatcacctcaattatcaccttatggctaggtcttcaggctccagacgtgctactctttttttttttcaatctcctgcataaccattaagcgactaggttcatgtagttttgtgttcccacttttgatgtcaaaaaggaaactgaaaacgaattcccagcatgcggttcggaaacaacctatcattaattcaagaaaaaaatgaaaataatactacataatttgacaacgacaaggatagcttttgagaagaatatcccgatctatagttagttagcttacttctactagtcatatggaaaaattgttccatgtatctattttcttgctcgtactattgttctgcctaactaactttaaattggcaactttctgtgctctcgccattcttgttttttttttttctttacccgttttttaagaaattttagttgattttgagacaaaagagcataattaaaagaaacagaaacttgaaatttgaaaatgctttttatatatattgattgcatttatacagtatgtatttgcaaacgagagaaaaactcatacagagaagtagtttatctttttacctttgagatcaagaacaaaagtcgataaagacaggaggcgatagttttgagaaagagatcattcagaaagcgtgctcgtaatacttcgggaatatagaaaggctattgattttagtatatcatcctagtaccagtttttgggactcctttttaactcacactggctgactattacaccaaagattgatacaagttagtgtcgcagcttttatttgtgtttatattatttttactaccttaaagttctgggattttttctctggataagagcttcgtataatcttttaaaggtaattaagtggggctcaaacttttaacaagggtatagttttgtttcgttggatattaaggccatctttaaggatgtctacggttaatatgagaccatctttggcctccatttcaggtgtcggtccttctggtccaactactgccacagctaccagttcaaggagtttcaaaccgtgtgcaaattgtacttgcagttacgggcagttgtctagacaaggtagaagatcatcagctttattgaaacaaatcaacttttccagaaggcattctcattttgggaatccacctttaagtcctaccagtgaatccatatattcaactgattctatttgtcagctcaaaagtactgaaaccgcaaagagattgcttgccttaaggaagcaaatggatacacatgatttgtgctgttacattattccatcagaggacgaacatcagtctgaatacgtttctcaagctgacgaaagacgtgcattcatttctgggtttaccggaagtgccggagttgcctgtgtaacaagagacttattgaatttcaacacagataagcctgagggcgaagctattttgagcactgatgggcgctattttaaccaagccagtcaagaactggattgtaactggactttagtaaggcagggagaagatcctataacttggcaacaatgggctgttaacgaggcacatgaaatgtcgcttgctcttggtggaaaaccaacaaagattggtatcgatccaagattaatcagttttgatcaagtgagaatgtttgagaaagtgatcaaggataaaactgaaggaactaatgcaaagattgaatttgttgctgttgcagataatttggtggataaaatctggtgcgagtttgaaaccatgcccgtcagagacttaaatgaattactactattggatcgcaaatatactggagaatgttacaagtctaagcgtgagcgtgttatgaacaagatttcaaaggaccacaatggagcctctcatttggtagtttttgccttggacgaaatatgttggttattaaatctacgtggttcagacattgaatacaatccagttttctttgcttatcttgttttgtccaacgatgaaacgatactcttcactgataatccatttgatgataaaattgaaaattatttgagtgaaaataacatcaaagttgaatcatatcaaaatatctggtcatttttgtctgacaaggcttctgcccttgcggagaaaaaagaaacaattctgattccatccaactcatcatgggaaattgttcgtaagttatatggttctactatgaagcgtgtatcgtctccaatcgaagttatgaaatctgttaaaaatgagaccgaaatccaaaatgctcattctgctcaagtaaaagatgccgtcgcgttgattcagtatttctcttggttagaagatcaacttgttaagcatgagaaattaattgatgaacacaaggcttctcaaaagttaacggaaatcagaaagacagcgaaacactacatgggtaattcgttctgtaccatttcatccactggatcgaatgctgcagtgattcattacgaaccacccgaagagaactcgtccatgatcgatccaaacaaaatatatctatgtgattcaggagcacaatttttagaaggtacgacagacatcacacgtacgttacatttcacggagccgacgcaggaagagattgataactatacactagtattgaaaggtaatttggcacttgaacggttggtggttcctgagggcaccagtggatataacatcgatgttattgccagacagtttttgtggcaagctggactggattacaagcatggtacaggtcacggtgttggttcattcttgaatgttcacgagggaccaatcggaattggatacaaaccacatcttgtaaatttccccttggaaaagggaaatataatcaccaatgaaccaggttattataaagatggtgaatacggtatccgaatagaaaacgatctactcgtcaaggaagctgaaggactacaatttggtaagcgtaaatttttgaagttcgagaacctaactatggtaccttactgtaagaagttaatcaacacaagtcttttgacgccagaggagaaatcacagattaacgactatcatacaaggatatggtcttcaatcgttccattcttgcaaccatccagtattgcattcaaatggctcaagagagaaactaaatcactatgatccgtgcctttcttttctctattagatcactgattttgtctacctattcggaaatggtgacagaacttgttccaatttcttcacatgaacatgcgttttcttattaatttggtccatattagtatttcctttctattcaacttcttaattcaccttcgtttatcagaatcaccattttttttcactgtctattcagagtcaactaaacatatgcaacgtccttgttgtctgtctatataagtacttttaaatattacttccttcgttaacatgtactggttgcactagtattaatgccattcattacccatcgccagatttccccctgttactcatatttgtcacgtgtggtcacatgttttcatccgggtaaccatatcctgacaagtaagaatccttttcgttttttgctgacgtgagatgacagttacccgtcccacatcccttacttttccccgggatccgaacacggatcaagtaggaaacgcgcagcgggactgattcgttgtaaactagtcattcacttttttaacttgttatgatgtatgcacaggagaacagaggatgagaaaaaaaattgaaaattagaggatatataacgaaacacttataataaagcatactttctcccgtttctttggttagattccaaatttgctagtatccaaatcatcaatcaactgaaggcaggccatactctcgcacaggttgtacagagattacattctgattctattattatttattagcatacaacgttgtggtttttctacatcagtacttgaaatattgatatccatcgggtttgctccaaaagtccaaagaaggtaaaacaaagtgaaagtgactttctcacgcagaaggagctctatttatctattgatttcaaacgatgcaaagacacatactatctagaagcaaccagtgcctgctgcgtggcaatgtgctggcagtgagacatctttctcaaaggccactggcaaggactaagaggtttttgcaaacctctcagaatggggataaagtgaatgctccagtttggccattcaattttgaaattccagtgaagaacggtaagagtagtgcacctggtacacaggaagaagcatctggatctgggaccgcaggtgctaaaaagacatggctcacttactcgcttcctaaaaatgttgccaagaagggggaacctttacagacccaaccacccaaagtcgatgaaaatattcaaccaaaaaaacgtgcaaagagaaagctaaggccacgtaaagctctaatatcgttgacgcccaatgctctttctcatttgaaggggttgctcgatcaacctgaacctaaactaataagaataggagttaaaaatagaggatgttccggtttgacttacgatttgcaatatattactagtccaggaaagttcgatgaagtggtagagcaagacggtgtgaaggttataattgattcaaaggctcttttcagtatagttggtagtgaaatggactgggtagatgataagttgtcctctagatttgttttcaagaatccaaactctaagggtacatgcggatgcggtgaaagtttcatggtataattaatgcaagatctttccatcatcatcggcatcattatcatccacaactttgcattgggatgaagcataaatattcatcacctgtaaggagcattgactgttgtcgctttcatccggattgcctctggagaaaaataaagaaactaacagttgacgcaactaacacaacactcaccccacgtattattcttctgataggtttgctacctcttactacaaggtgtttagtttggaaaactcattctaacgacatttatttatacaatagcatcggatcctgatcttttttactagcaggtattctttccatttggggtacgtacgggggcataaagcgtccgggacgctgatgatatcccccggaggagaattgcttgaatttattcttttattcatttgttcaatgcgatacaccctaagaaatcctccctcattcaatctctttcttccacaccaataatacccttaaacacaattacaatcatcattataattctatatgtatatttattggtcacaaaaaatgctacctgatgtagctcgtttataacttttttaacatcatatttattctatcaaaccatattctagctacgttactttaattaaacggacgttgcggttgtgattacactaatgggagagctctattaatttcgctgtccaaggatatatttgctgtcccaatattaaaaaaaatactcgaaggtactttaacaaaattaatggacgtgcacgtcccgcgacagaataaaattcaaaataaaaatatatacactgagcacagaaaccaagatgtgcagtgacacaaaggtttctcttacctattttctgacatggctctctgattctgtatttgtaccccattccttgtcacgctgaaatattttaaatatataaacctctttgtataggataaaattacttctctttttaccgtcacaaaaggcacttctcttattctactttacagtattattaccacctagaaactctctaaggaactttttaaataagcactcgtattccaaccggttttttaaacaagtccaggaaaacaaacttaccaaagtctttattcaattacacttaaaagaatatatctgtcatgcaacaaaaaaagctaattccaattttagtcgctcttccaatagcactagcaggtgctgatagagagtctgcgccagttgtttatgaaaatccagagaaagcctgctaccttgcagaatttcctcaggttggctccgataaggttggtggatacatcacactttcactagtcttgatggaattgccaaggtaaacgtcagaatatcgactttggagccaaagcttcaatatcacatccacgaaaaaccagttgatccatccgatccaacttgtgagtctacaaaagaacacttgaacccttacaatgggcaggtgccatgcggtaatgatatctccaaatgtgaagttggtgacttaagtggtaagtacggtaacatcgactacagttattacgagacggaatatttggatccatacttatcattgatcgagggtgatcccgcttttgttggaggtagatcaattaccttacattattctaatggtacaagatatgcatgcgctgacattgttccatgtgagaaattgaagccatctccaaaaccaccaaaggaagacaaactaaaggaggacgaaccaaaggaagacgaaccaaaggaagacaaaccaaaggaagacgaaccaaaggaagacgaaccaaaggaagacgaaccaaaggaagacaaaccaaaggaaaaagatccaaaggacgacacatcaaaggacgaaaagtctgaggaagagaagccaaaagaagataaaaaaaccaagaaagagaagaaaaaggctaagaaggaagaagagaaaaagcaaaaggaagataagaagaacaaaaaacatagtgacaagaagaacaaaaaacatgatgatgatgatgaatactccgaagctgaaccttcagtgactgaagaaaaacgtgttgagacgagtttcaccaagaaaccacatcacactacctctgctgcattgaaggaaggttacaaagaggtaaagaacgaaacggacactgaatggaaaacagatgacggtcactacaatggcactgagactgatcattctactgccctaaatgatgcttataattggaagagaacttcgtccataggctccattattgctttcatgatgtccttgttaatttgattcaaaaacgaaagatcatcacgcacatgagctggaatatctagttatacatatgtagatcttacaaggaaaataataatatgttgctatccaaaacttgacacaatgccaatgatattgtcttaattaacgtgaattacaaaactgacgcctgacatcgaaacagaagtgcgttccaaaaacctagcgttaaatttcaaaatctatcacgtgatggtgatccacttgttccagtttttttcttcggttttctttgtggacatgcactttcgagagtcttccagaaaaatccggtaatgttctagctatcacggttccggactctagcttagagcagagtgaattttaagtagctttacaatccccacacagcttctacattgccgtaagcaacatgctgggatagctggttgtttgatctagtattcaactaacaataaggacgtacttacaattttctattttacgtagccatgaacgtcagtcccaacggtaatttaaaagcttaaccttgagtgagtgaattattcgagaatgtactggtttatactggaaaagtaatgtagttgttagagctttgtttgtctgtgaattgggcaatactaaagctgggactggtaccgggagataggggttgaggtatattttgctttgctattagttttcttaataaggtgattttagggtatcttttgatagatgcttatagaaagaataggtgaaaaaaaaagtttatagaatataagcgtagtgaagaggtatataaagggagaccatccgaagaatcatttgttgagtgcttcctgctttggaattcaattacatcaattgtatcaatagtggtctatctgatagaaataaacaacaattgtcaggatcatcaaacgcatcaacagtttattgtctagaaagaagatattactacaatgaacgacgaaacacaatttacaaataaggccaacgaaattatccgtttggcccagaaattggctcaggatcacagacatgctcagttacaaccaattcacttacttgctgcatttgttgagccaaacgaggatggttctgttggattcttacaaaacttggtggaattagcgaaatatgattatgaacctttgaaaagggccatcaacagaaacctagtcaggactccatctcagacgcccgcaccattagaaattcagccaagttatgctttcgggcaggtcttgaaagatacttcagaaattaggaaacagcaaaaagattcattcgtcggtcaagatcatatattgactgctttgttcaaagatgcaacaactcaaagcatttttaaggagtgttccattgacatagaatctgtgaagcagcagatgctcgaattgagaggcaatcaacgaattgattcaagagacgctgatacaaatgaaaaatgggaatatttgaagaagtatgcgatcgatatgactgaacaggctagagcaggtaagttggatcctgttatcggtagagaagaagaaattagaactgccatcactgttcttgctagaagaatcaagtcaaatccatgtttgatcggtgagccaggtattggtaagactgccattgtagaaggtgttgctcaaagaattatcgacgatgatgttccacaaattctacagggttgcaaattattttctttggatcttgctgcattgacggctggtgccaaatataaaggtgatttcgaggaaagattaaaaggtgtcttgaaagaaatcgaggaatcaaagactttaattatattattcatcgatgagattcatatgttgatgggccaaggtgtagatgattctgccaatgctgctaatattttgaaaccagccttatctcgtggtggcttgaaggtaattggtgccactaccactaacgaatatagatctttggtcgagaaggatggtgctttcgaaagaagattccagaagattgatgtccctgaaccaacgacaaggcaaacggtagctattttgagaggtttacagccaaagtatgaaatacatcatggtgttagaattctagatagtgccctagtgtctgcagctcaactagctaagaggtacttgccatacagaagattacctgattctgctattgacttggttgatatttcatgtgccggtgtcgctgttgctcgtgattctaagcccgaagaattagacaataaagagcgcgaattgcatttactacaggttgaaatcaaggcattagaaagagatgaagaaacggatccaacgacaaaagaaaggctacaacaagccagacaaaaggaagcttcattaattgaggaattggaaccaatgagacagcgttaccaacaggaagtggattctcatgaacaactaagacaagccaaaaagaagctcgatgaattggaaaacaaatgcatggatgccgaacgtcgttacgataatgctaccgcagctgatttgaaatactttgctattccggatatcaagaaacgtattgaggaattggaacaaaaagttgctgaagaagaatccagggaaggttctgaaacaatggtgaagaacgtggttaacagcgaggttattgccgagactgccgctagaatgaccggtattccagtgaataaactaactgaatctgaaaacacaaagttgatccatatggaacgtgagttatcgcaacaagttgtgggtcaaatggaggctgtgaaagccgtttctaacgctgtcagactttctagatctggtttgtctaaccctaatcaaccggcatctttcttattcctaggtttatctggttccggtaagactgaattagctaagaaagtcgcatccttcttgtttaatgatgaaaaagctatggtcagaatcgattgttcagaattgatggagaaacattcagtttcgaaattattaggtactactgccggttacattggttaccaagaaggtggtttcttaactaatcaattacagagaagaccatacagtgtgttgttatttgatgaagtcgaaaaggcccaccctgatgtcttgaccgttcttttgcaaatgttagatgacggcagaatcactagtggtcaaggtaagacaattgactgttcgaactgtattgtaattatgacttctaatttgggtgcccaatttatcaatgctcagactggatcaaaggttactgagggttccaaagagttggtgatgagtgccgttaaagcacatttcagaccagaattcttgaatagaatctcaagtatcgtggtattcaacaagctttctcacaaggccattcacaaaattgttgatatcagaatcaaagacttggagaagcaatttgcggataatgataagaattacaagatcaacgtttcaccaccagctcgggatttcttgaccaagaatggttactcggaggatatgggtgctaggccattgaacagattaattcaaaccgagattttgaacccaatggcaatccatatcttgaagggtgagatcaaagacaaagaaattgtcaatgtagaagtgggtgccgatggatctcatttagaagttttaccaaatcacccagcttcatcagaaattggtgatgaagacatggatttggacttggacgacgatgacgacttagacctagactgatctaaaatgaattacaaaaagaaaacatacaaacaaactcactcagtaataaaatttcagttcaacagtaccatcatatatagtgtaaagtacatatttttttcactttctttagtataatattttgacttttacatgttttcatgttcataagaggtgcaaaccaatggtgctgctgttattcatacaagcgtactaactaagcattctggctgagtttgtattacatgttacttagatgggcagggttctttcagcctttttcactgatttcccaagtcagtaagtccaattttgcacatgattcaaaagaatttgattggtctttcttcaaatcatgcttctttcctcacgaatgttaatcttcggcttttttcctcttcttccctcgttccgtggagttattggctgagtaacatcccatatacctttcgttctgggcatcgctaaacatgcttggtaaagagatagacgtagatcattttccctgaaaggcttccattattacatgtcaaaaattagcaggcaatcagatggactaaagcgtacgctcgcatttggatacgagcctctctataattcgaagacacacgtaccaatgtgtgggataagacgcaaacgcgtcggaagggaaggaacggaaaaacgcttatcggcctctaagaaagaatgcagaagcgaagaaaatccagcactgtaaattcgtttcatttcgtagattcatctcaggtgcctattttttagtttgtatgcaaaaggacatgtgttctccttggttttttttatctacagaatgaaggaggccggatcttggcagtaactgttgttcggattacaagattgaaatgtttctggcttattaagagtacaggaacttgagggtgatttaccggtactttgtttggttcgatttactattttattgattgattgaattatgtcttacaattgccatggttaccacaattcctattgtgctaacagatactataattattatttatttacctgtgccacgctaactagttcaagtgcggatttgttttgcatataaggagagcaacccgttttttcccaactctgccgttgcatttttccaacaccgttttgagtatgaacaatgtgccgtatttgcatgcaagttaaaaagaaaaaacagtcaataatgccactgtgggtaaactcataattgtcatgttgccagggtttctttccataccaaacgcgtactggaggtaatcgacttttttttattctaaatcaggaaattcaaataccgtgatgcaatgccactacatcaatatgtacattcccgaaatttccgttggtggattccgaaccacctttagctcctcgtgcatgaggcacttacagtcgcgtcttggctggacccgtagtagtatatagctatctattctatatatcgtatacccgattttgcattatcttacagccgagagcctgtgcttacatttccggttaaacagtttgagatattagggtgatttctttttgtaatcggctgccaaactaaggtttactcctgatttgaaaatgtggactgtttttggcattgttttttctctaaattctcttttctttgcgctttttttgacattttctctgattgtgctgtacagataagacgttctgaaccatcactacaaaaaattatgggaaacaatttctattctgtttacttgaagagcaggcaatatagagattgccattctaactgacatcctactatgttttttgtgaaagcgaaagcctatccatttgcgtatattattgttgcactactagattcgtgaaaggattatcgtgccgtgacatattaatgcatgataaaagcaggaaaaatagggtctgatctaaagcatagctgcagtcgccttagaagctaccgtgcaaactaataatagaaaaaatcaaaggatacttactgttcggggtgtgcatgcgatattgtgataccggatttaaccgtcagattcaccacggcatctttttctgaggactccgaacatgctctcatttgcaagatgtaaatgaaagcacaatttcaccgagaaatactgtgcatctgcttagcagtgaggcacaccggtaagggtatctcgatttctcaccaagaagatgcagtcaaaaaattagtgaagccacgattagattatgatatctttcctctttatttctcttcattttcattactcatttgcataattttgagcctgtttttaccaagtagttatcgaattctttcactgatttttgggcccaaagtctgtaagtatgataaaggttacatcatgctcatgtaggaatacattaaaagtggtcttatttcgcattagaaataaacccccaacgccaccatgtttggaatgtttggaggaacatgatccccgctctctggaagatgttcacctttgaggggactaaagccagctacgagatatctaagacaaactgcagaaagtatcgtacagatttcagctgtaggcagaaaaaatgctgttcgaatccaaatgaaattcattgaatctttttttttcaatcataattttttgatctgcagtacgaatatttctgcgtcaaggcaccttttcactgtacgtaaaaacagaaactcctacaatttttctttgtgttgttagtactgatttagtcagcactaaaaagactagatataaagtttttgcacagtccatggaaattatttacacactagccaatgaggggatctaaatttttgggaatactatggctttagaacaactgaaatattcaaaagagaaggcttgcagattatacggagtgtttggcttatatttttgttttcatatcattcttctagggaaagaagagaaacgacgattctcttctgtagtggtaacggtaaagggtatccaagctgctaccagcacaacgcaaatacaagtattagactagaaaggatttcggacccttagaattctaatgatcgaagttagccagaagggttgaaaaaagaaaagtgaacaaaaggcgataaacggagagtgcagaaaaaattgcagtgttaacagcggcaatgcacgtacaaaatataattattactagtaaatgggaataaccaataaaaaggcactagcaacggtatttcagatgccatatagcagtaaaacaaaatactaaacgtgggagatcccgataatcgatagagttaacaacctgttcgttaagtgactggggctattttaaaaacatacgcggcattagtattagattattaagtctcgattgaatcatattcttatcaataatccttactaaaacaaaatctagaagaatgtgaattataccattctcccgtagcttcaaaaatgtcaaaatgctgcagttcggtttttggcataatgtttgatacttttctctaaaatgtgccttttacttactgattttctagaattattattttaccttaacattatttcagaaaagaagtaaatttatgatgttatattgaatgacggggttcattttctgtcctcattagaaaaggggaacagtcttgtataaacgtagtaatgggctgttaacgattggagcctttctgtttattcattcttttattgcagtagcttttcagtaatagtgaataatcctgggatatagcaagtgtgcgtaatttcatctcttgtctcttcggtgaaacttactgacaacagggtagcttcattcatttcggcattttttagttccttattttgtattagccttatcttttatttctgtgcaccggatatgatatggtaaatagggaactaatgacaacagttgtgtattccaaagcagctgtggttctttgcagccatcaataccgctttttatttggaagtttgaactgtggtaaaatcagcatatggttcaagagctttacaatatgtaagagttctcgataagcataaaggtatagaagaggagaaactaatcaccttcaatgcaacttaagattaattgtgacgtaactgaaaaattcttctcacagatagtgactcgtcctaaaaaccgacaaaagaaaacgtattatcagcagcaaattctgggtccaaaaaaatatcgcgtcaaagatataacggtgttagacgctaagctctctgcagttttattctgccttcttttctttaatttttcataaccaatttatcaaggcacgcttttgtctatgtcctgctagaatccataataaaacgcccttcacctaatatatggctactttctaaccaaggagatctttcatttccacagcactttctgttatgtacgcattccaaaaaccgaagaaaaatatagatgatttgtacatttccctttttgtctcctctcccttttttttctttccgttctacagtatcttctgtgtcatattcattcgctctgaatagtgtgaacgggccaatttactaaattgtcacgaactgaaaaataaaaagaactcacacgacatacatgcacaacgtcttgattaattaagaatttctggctgttcaatatatgtaatttatttgtttatttctagtttcgattggtataatcaaggatactactactagattccctaagtccttttcaattgatataaaaggaaacaattttagctgatttctgttgccatttcctcaaaagaatacattgaatctcgattagtatatctaccctaacaggactccttctgttccttttttttttttttgacattgtttttctctcttttaattagtttcggcggttcttttcgatttgcggagattttactttaccattttcctggaacttctggtaactagtgcggatacttttacgaataacgcttatccttgtactatcattattgtttattagttcaacacagtagcaaaacatttcagaatagatttgatttgaaatcagtgtcgaagtcagggcttaagcaaaataacgttaagacagtattttcaggtgtttccataatataaaacagactgaggtaaaaaagaatagtggtttacaaaccttgtttggtagaatcaactttttctgagctttcgcttgttttggctgtcacatatatcgaatttcgcatttttaaaattttttttggcatcgttgcccatattctgacgcacatatatcgctctgcttttgcttgcgctattcaaatatccatacactgcaattttatcttgcggtattctggttcaataaatcattatttttaacaactggctcttccatttcctgcaattctgtcaaggagcaacttaaagaaaaaaaggaattacagtcctgaaatataaacctatcgagtttcatacttgttagatctgagattagctcctcgcaatcaagaattctgtttttactttgatttcttctttcttttggagtacaagaacgcataatttgggttatttcatatagctagtcgaatttgtcatctgaagcattggccgatttcatcatctgatattctttctacgacgactctattagtttcgctgaaatccttttcggcttctgagaacagtctctacagttctattttcagatttttacccgatttggcttcgtttggtacttttttttttagcagccaatgcaagtttgaactggaaaaagaccgttcaaagagtcacaagataatacagggacaaaatattcaacaaaggagcattctgaacttttgaaagatagttttatttcaaaacttgcctccacacaattgcaaaacattattatatccctgttttttattatatccagttttcatatttttgttttgaactcgtacacatatcaaacagtgaaaactgcactcaaaatataataaccgatcaattataaattgatttaagctgcaatacctttctccctcattgtgttctccttcctatctttacacaatatctttattatcttgtgttttattagctgttctgattctccttccttctccttcaatcaaatattaatattgaggagaggaaacgaacccataatccaatagatcaccgacataaggcaaaagtacactcgcacgttacaagactgttgaccataccgtacgaataaaggagcacattgttttattccattacaaattccgagattatatcgcctagaaataaaagtagggggctatctggacatatttatactatttgtccacttgttttttccctctcttggccaggtcactttgccgcagtacttgaaaattaagacaaatttttttttgagaaataaaaccggagctgaagtttcagaggaaaagcgcatattcccccccaaagtgagaaaaaaattgcacgattttcacgacgcaagaagatccacggcaaaaggttttctatttctcgggatacaatatctttctatcacctccattctccgaacaaacagggcaaatcatagatcgttttaaatagggtttgtgaccaatattttctccacagcgtgccatatcaataacgttgctcaggtcaaattatattaagaaggctaaatcataactagctgcttcgaacccacagattcatcgaaccgttttgatcaaaacagtttctttgttctgaagtttgtcatttgaggaatcaaaatttgtcacatcactattgattcatcctttttacagatctgacttttttttcgttttttgcacagaggaggaaagccgaaaaccttaatagtgcctaacgtctaaaaaaagaaaacaacaaagagtaatgtcatccaatatgtcgaaaaacatcaacgagagttttaaagaccgtattgtgattaatgattcacccaatgagtcaggtgaaatattaaggcaaaggtcgaatgaaactgaaaaccaaaccaaaaataaagaggaaatttcttcagataaacctgtcatcaatttagaaaaggaattgactgctcttaaaatcgaccgtcaatcattgttagatgataatttaacaaacttgctgccagaacagctttctgaaatagcaagtgaatcagaaacagattcagatgaggatactactaatttgttggatgaaccgtctccaagatcctctgatgacccttccttttcaagaccatcgtcttgtattttcgttgcgtctttagcggccactcttagtgattccgaactcaacgcatccgtgacaaaagagtttgcgaaatatggtaaaattgtgtctgtgaaagtattgcgtgatccagcaaacaggccttacgcatttgttcaatatgcatcagacgatgaagcattgaatgcgttatctcaagctcaaggtacaacgttaaacaatagaaatattcgttgtgaaagagcaaaggtcaacagaactgtattcatctcgtcaagttttgctaatccactagagggaaaattaactgttgaaaaagtggtagatttgatgagtaaatttggggaattggaacaagttgtccctagcagagaccaaatgtataagaaaaattattatccaagtgaggtagcaaactcttggtttatccaatacgcttatcgggacgatgcgattagagcatatttgcaaatgaaactcaattacgaatacatggtggaatgggcacaaaatgtcgatgttcctccaaggttcaatttgctactttcaaaggctaaaatttgcgaaaaggaacgattagaaagagaacgattcggtaagcaaccaattttcatcgataacaagtccatattcataggacaattgaattttaaagttactaaaccattacttttggaaaggttttcaaaatatggagaaatcgacaattgcaacttgatccacaagcaggaacaattgaaatgctttgcctttatcaagtacaagactccggcatcagctgcaaaagcgttggaaagagagaatcattcaatattcgtggagaaaatactgcatgtgcagatcagagaggtatctaattcaaggcgtagttcaattgattccaataagtcattccaggggcctcagttgaacttggcacctccgcctttgaatataggaaggagagcaagtacagggtctttttcaaaatacatgtatccattaccaaatcatttacaaccaaatctgccatctcattatgtgtatgctacgatacaagaaccaaggagaaatactataaactcaggctcatcatcctaccacaaccataatcatgttttcgttggcaatactggttcacaaggtttttataatgaaaatggtaaccagtatgtttatggcacagaaagcaaaaattatcccaacaaaacagacaatggagttgaaaaagaaaatgcttatctagaaggtcctcagcaaatgcatagtacccacttcaataggtcaaaagacgatatcgaaaatagcacaattgaagaagaagatgatgaatatgaagtcgatgaagacaatgatgcagaggacacacatttcttagaacacgagtccaactcatcattcacaactttcagcgcaggcactggaacgttcaaacataacaatgcgcataacactggttcttatcaaaagaatcatagttacaagaagcgaagaaatgtagatgcaccaaggcatggtaggatggatccaaatttctactacggcccgccagtgtactacccaatggagtactgtccaccttctggtagccccgttggccctccgccctctcacttgattcagccgggcgctcacttgacgggacagtgtccaccttctcaacattccccattcttttattacttccctatgccacctcctacaccgacatttactaatccattcccacacgaacaccctggcggtatgaactatttggataattctgtctctggacatgataaagcagacctcgactattgaatatgtcattttctttctacttttttttagcgtaatcattgcactatcttaggccctcctagtgattaactctttttcaccttctttttagtcaaccacagggcatatactcggcaccgtcttataatatgttccccagtggcgtttcatttgtacatgtccttctcttttagataaataaacttaagatatcatcttaaactttacatgcatggcatatatatatagatatgttttctgttcgagcttctccggaattacaaactgttatggttacaacatgcaaaacaaaaaatataaaacacagtgaattgattagttatgacataaagttatgcaactccaaaaatggcttattatatagtacttaattattatgcattgacaaaatcctgtgcgtagaatcgattagaagaataacaatgtaaggggatagggcatttaccagtgttttacttcaacgatgtacttacctaaggcctgaagcaatctttttatctcatttttaggaataccttccttaatcataatgtactccaaagaaaccttcccattaaagtatttcaccacttgtctaaatagcgtttgaagatcagtaggtaatgcctcagcacatttgtacaaccatctcttttctaatgcagtattacgttctggttcaagaattatagtgaaatcattatcgttgatcatctccaaatcatcaaactcactggagttataattttcacctccagtaacaaaattaccggacttttcgtgtttgttcgatcttaagttatccttttctagatcctcatcgacagctattttaatgcgcttgtccacacgtacatacacaaacgtcaataattgagtgaggtatccgtacctcatgagccatgccagggcattcaaatacatagatttatgttcattggatggtatgatatgcccgaaaggtctgggtttctgggttgacataagttgaaggaacgatggcaaagaaggtaaggagggaaatttttcattgaataccttcttgttttggtatatcaacgacggttcatcgttgttattcacaggaacttcttgttgtcttattaaggtgtcgtattcgccatgtttgaagtcatcagttgaaaatcctgagattggcgccaatggagaaactatatatgtgtttctcgatgatattggcagtatcaaacgggcgtgacgccagtatattaaatgtagacataacgactttaaagtagtttcacagaattgatcatcatatgaggaatcattagaatcgattagctctttaattaataatttatattgaccaagccttatagtgggcttcaactgtcttacaaggttgatcaaaagtaaatcagtaacgccgttatcaaaggaagcgttttcaagcccttttataatattttcaggttcatcgagcaaaagcaatccataatctagaagcctgtcgtggttggcatacaaattatctgaatcttcgtttgtcaagctagtgcttctaccaataaaactttcgtttagtattgaggataagaaagatccacgaagaacagcatcttcttttaaatttggaagaatggaaaattcatttttgattggaatctgcaaggaaacaattttatcaccatcaatttcaagattagcaatttcattgttatggatgcaattgaaacattttgttaacgctctagctagtgacgattcgtaaagaattctttcatacatatattttcctttagaccagggagattttaaagactcataatatcgagagtgtttagaaacttcgtccttacacttcataattttcacgcattccctagtgacataaccggtttttccttgtatgtaccttaaaatcaatgataatctagtcaccacgtaatgatacatatcatcgactctttcattatattctatgatctttgggttcatgatgaagcagacctggaacatgtttatactctgctgcaaactttcgaattcatcattttccgcatcaggcacacagtacatttcattaagcatttctgatttggatggttcataatcactattctcatcatctgcaggttcttcaacatcattaatgtgtccttgactctctgttttagatctgtttcgaccaatactatttcgaccaacactatttctactaatactgtttcgtgcagtgctacttctagccgaacgtttggaagcttgctttctcttctttgatttcttccatcttcctttgtgatccgcgtgaattggcaaccctaagaaacataagtcatccacagtgaattcaaatctggtgttacacatctcctttcttggagaacagagttcagctacaaattctgtattgaaatttagtacttttgagatatcctgaaatgtatcctgctgaaatattgaaccatctagcaaatcgtctaccaagattttcaactcttcatctactgcatccaattcatcttctggtctcggatcagtcgtactagacatattagtcgatgttctaatcgagtgcaacgattccctcaacgagttttcgccattgattgcaacattgttattattctgatttagcacttgaaagagtttattcgcactaatctgagattgacgagatcgtagaccattattgataaatgtattgtttgtactgctgtttacagtatcctcatgatttgattgtggaagggagtctaacgatgattctgatgcatcagatgaacaatctgcatagtcagtcgacaactcgctatcactcaaacctgaagagtagtcatctgaagacgaattgttttcagagtccgtatactcgtatcttttcttgatatctgggtgatgcgtcttcttcgaattggtcgcagtagcatagttgcttggtggataatgataaattaattgtggacccgaatgagttgaaacagttaatgcgatttgtactaagcaggaattcggtaaattcgtggacattgagctattcctatctcttggagcttcatagactgctgaactcttagattgagggaaagattctttcgaattagcagttataccccagtacttttgtatattaggtgttttatcagttaatcaagtaaaatgactatcgtattttcatatttttcatgtgtagatatttctataataataagggaaactatatatgactggagagacagcacaagtagacactacgaaatctcctttggtttgttaatatcggggtgtcgtatatgcttaagtttttggaacagtaaaactcaaacgttgctgaatgtatttgagggcttttaatttgtcgtgtggtgtatgttcctgcagttttaactttcaaaattagataagaacaaacagagattaaaatattgtctgctaagaaagtaggatcgcgtaatcgatactagaacatctcaaaaggtcctgatgttactactattattcttgaaagtttcattaaacgtaaaatatagtgctattgaaatcaattatgtatgaagggattcagagcgagagaagaaaaccggattcattatcgaaccatattgaagtaaaattattttgaggtgtcgacaacgtatctaccaacgatttcacccttgaccatcttgtcataaacatctgccaattcagataatccgactatcttaattggagcatgcactaaacctcttgcgaagaaatctagagcttctctggtgtcagctctgttaccgacgtaagaaccaacaatggagaccgatttgacaacttgtgtaaagacatcagacttacatttggcgtcccttggtagaccgaccaatacaacggtaccgtttgatctaacgtaattggtggattgttctatagcaaattcggagacagagacgttaatgacaccgtgggcaccaccgttagtagcgtcaacaatttctttaatcaaatccttagagacggcataatcgacgaagtattcaccacctagctccttgaacaacttagccttttcagcaccggtatcaatacccaagactctgtaacccatagccttggcgtattggatagccaaagaacctagaccaccacaggcaccggaaatggcaacccagtcaccggccttcaagtcagcagattttagagccttgtaaacggtaacaccggcacatagaattggagcaacttcagccaaatcggtaccctttggaattctagcagcttgaacggcatcagcggtagcatattgttggaaagaaccatcgtgggtgtaaccagacaagtcagcatcgggacagttggattcattggacaattcacagtattcacaggacatacaagaaccgttcaaccatttgataccagcaaagtcaccaatgttccagcccttgacattttcacccatagcaacaacgacaccagcaccttcgtgaccaccaactaatggcaatttggttggcaaaggccagtcacccttccatgcgtgcaaatcggtgtgacagacaccggagtacttgacgttgatcaaaagttcgttggcctttggctttggaactggaatgtccttgtattgcaattcaccaccgttttcgtaaaagataacacccttttgagtttcaggaatggacattttttaattaatattgatattctttttagcttgattgcttgttattcagtatgatagctgatggtgatttatgtaactaaatgtgattggaagaacgacaattattacgatctcaacaagagaattggaaaatatactaaaatccatccccttatataagttctaatttcatttcttttcaaaaacctaaccccatcactttcatagttctaccctataactttgtgggggcatcctttaacggtttctccaggcccgtggtgagctttagacagtataagaatccagtgctatgtctagctggcaaacaaaatttaggggaacctcgatgcccatatctaaactaagctgaaaaaaaagaaagaagggaaatcgagatagattgtgattctttgacagaattcagaattcaacatcacctgttgttgcatcgatacggtctgatcaatcggaactgctcggttccatcttgaccgattaaattctatatggggattagaagccaaggaacagccagccattcgaaacttaggacaaataatctagccgacatgcgacagaactggatatagaagaacataattggcagagtttacgcagactaccagaacagagcaggacagaatatggtacgatattgatcgtgccatatacacccgtacagaccatacagaccgtatagtgactattgaaggtctattattggtagccttcaagtgaaagaaggacccactggctgcgacatccactaacgtggaaatagcctgactctgtgagcttcccattttttgctatcgaatatcacaggtaaaaggcaccccacaagagagtatctggattcctatcattttgaagaagatatgaacagaaaagtggcagcctggatgaagcatatcactcggagaaaagtgaagaagacaggcagctgcggatctttttcagtggggcagaagaaaagcctagaaaaaacttgtatggaggaaaaaatgccaattgcctataacgataagaccgggtaatagacatatgtttttccgttatcacccctcattttgagacttctatgttcttcacacaagatgtgagctgattcagaccataggattcccaaaattaagggttgtaatgcattttcacaggtctctggttcacgacctatcccatttatataccatcacacaacatcactccaaaggttatcacgtagcgtccctaacctttcgaattgtattgggattggatttatagctttaattgaagcgagtgcaagcgcatgtggcgtgcatatatatatatatatatatgttgaagctggagaatcagctgctagtcacatgaccgaccattacccggagctaaatggcctttggctcttttagctccgggtaacaaacagcagacaccacagtttgtgtggcttcatcatttttttcgacaattctgactaatttcacatgagcaggaaactgatataaagattagtttttttcgctattggaagtagagattgcttgggggattttcggtgatgatttcacattttgacacatttcacgtttgggagtggtttcttgtctttttctcgaacttagcatatgatttttgcgttctgattacaattagggtactgttttgtatttttgaatgtgaaaaaacactagatctaagcaaattcaaatcaaaagttcactaaattcaaccggtctaattccgcttagaatattatttatatcaagacaggatttctttaagtccaactttcctaccttaacgtttaaaaataaagattcaactctacgtttccggtgaggttttttggtttgggtttagtttctgttaaaagtaattcaaagaccacgacttcgatttcaacattacgaaggatctttcaacagagaggaactcaacttccatagcagactcccgttaaatcgtttatctcttcatcgattcactcaactgaaataaccaaacaaaaattatacccgcaggatggctacttcctgtgaatcgaccgttttgaaacctgatgggaagttaaattcacatgtgaaaattccaatagcccatccaaggtcttcatcgactatcagattcgaccctccaaagacccatgacatggtaagatcattgttcgatccaactttgaagaagtctttcctagaatgctgtatcaccgctaccattatcggtaacgttattctttgctactatgcttatcagcatctcggtgctaataccacgaaaattatcttcttgagtcagtacatattttggagattgtcctacaacttgggtatcggtatagtattgcattaccaatcccattatgaatctttgacaaatttcgccaagaaacatactttgtttgataaaaaggcgaacaaccttttgtcaagatttgttaagttcgagatcagtgcaaaataccaaaaaggcgactctttgtaccgttacccagaagaatggaacacttggctcttgttcagacagtttgtcgatttaatcttaatgcaagattttaccacttacatgctttacgttgtgatttctttacctcataacgatattctcaacaatatcactagcttcaattctattggtatcagagtttggctcggtgttttaatggtccttttcaatatttgggtcaaaatcgacgcacattcagtggttaaagattatgcttggtactggggtgatttcttctttttgcaagacgcaaaccttgtctttgatggtgttttcaacgttttcccacatcccatgtattctatcggttacattggctactatgggttgagtttaatctccggcgatcatcatgttcttttcgtttccattcttggtcactgtttgcaattcttgtttttgaagtatgtggaaactcctcatatcgaacgcatctatggatctgattcatccgacgaagaggaatcaattgatgataagatggtcaaacaattagataactattccaagccattagtcacaacattcttgggtttcaaaaactttgacaagtttaaaccaactgattatatcactttaatcaccgtggcatcaattgttattgggtgcacaattttaaacccaagctttgtcactttatccaaaattgcgttgaccactaagattgtgtcatctgttatcaatatgactatattatacaagcaatcgaatagcaaatggttcacctcattatacttgaagaatggatacaatgaaatttatgcttatcaaatgtggcagtttatctacaatttacacagcactatcaattatattcttttggtattgcaatgctactaccattttgtcaaatgtgactcaggtagttacaatacaataacctttgggttgttgttgttggctattcaaatttggtgcaacactgagatcttccatagtattaaagaatttggctggttttatggtgatttcttcctacctaatttaattgacaaaaggaaattgaagaacgatggtatttatagatacttgaataatcctgagcgtgtgtttggtgttgcaggtatctgggggaccgtcttaattaacaatttttcaaattggaatctctggttagccactacatggacgatgttcaattggttcactgttaaattcatcgaaacaccacatttgttaaaggtttatggaaccaaaccaacatctagtggtttcgaaaagactttgaccaagtacaaatttggtaaggatttcaagagtttaatcgataaagttgatcaattgctcgatgattatttattcactagtctagtgccaaaacaaagcgttgctgaagcagatcgtgagggagattgggaatcgattatcaatatgcttttgattagagagcaaacggtgaaaaatttgcaaggcaccggccactttaacttggatatcgtcaacatcaatgacgaaaatacgattcggattccagaagaaatcgaaatcaaatgggccgttaccaatgaagctttccacaaagatgactggattggactttacaaagtcgttgaaactggtgaagatagattaactacaaagataccatctcaaggacattggtcggcggtatcttcgagctcttcatattctgaagatcatcagaagattttgcatttcgattcaaatgaccatttcacttatggatctataaaattcgataagagtatcctttgctttgaagaaggtatttatgaatttagataccacagtgctaacagtcacgatgttgttatgatctcgaaacctttcaagttattattccctcaatttaaagaaactgtaaaagacgtggaccaattaattgctaccacgaagcagttcttgaaacaatgtggtgttctaatcaatgataataaatttgatttgaataggaacaaatatttcactgggaaaacattacaaaactggtataagtctactatggacaccgatgtttccgttgtttacatgaaacgtaccaattttgatatcgatattatcaccaaaaaagtatggcaaatcaagcaagtgttagataacttggaataaatcgcattctattgtacttaactatatctaaagtatcaacccatgtataaataggatatgtttctaacgaatcctcacccttaatggtaaagccttgtatatttttattttgctaatacagaagaagcgttcgtgtcacattaattatgaatcactatgaaattacgttaaccatttcatttcatttaagatattgaaccaaagtctgcttatttaccaaatattttgccttgcactcttctattaattttgatatgtcagtgacgttatcgtcatcgctccaaataccgacgatttcatgtccattcctaataaacgcaaccacagagttatcttttgacccggcactcactaaatcaatgatttcaatacctgcgtctacaagagccatggtaatagaattaatgcatgtgggtagaatattaacgatatttgcctcctctgttggattactattagaatgctggatcaaatctataaagatatcaataccagattttggatacttctcaacgtttatcaccgcattaaagacatttgttaggaaagtacaaatttctttaatttctccggtattcaaatgttctaacgtaacttctttgaactgaatcgatactgatgccttagattggaaggagcctcgcaatggcctgggtccgaagacagaactcattacgagaacttgatccgaagtaccatccatatattctaggtatgaggaaccatttgcattcgttactaaatccgtactaatgaacacagattccttacccgatttattaccattaccatcgtccctgttctctacggttcttacaggagtaattgcagcaaactgcaatggcttcgcttctgctggccctaatattcttcttctatcttgcacactcattaatagacctctcttctgtgggtattagtttaatataacgatgggaaacaaactcaagtaaatatatgctgatatggcactagccaacgtcaacttggaagcatctcatcgcatgtatattcacttgcaaaacggtcactaacagaataccacgattgaaatagtcgagatggaaaaattctaacgtcatcacgtgataatatatatgtgtttcctatttgtttcccgtttgtttccgtaccgtacttgtttccaaattatcggcaggcagcattggaacttttttacaaatcaaccgacgatcagtacgtgtgaaatgatttctaaacagaagaagtggctgtcgcccggtattgtcaaaccagtaaatagtaatagatccgtatttctgaaaaagagtcgtgtactagctttcggctcatcacctcatacgtcagaaggaaacggagagaactgctttgtgaagttatataaccacgtgactaactggtgtttctcatatgtttctcatatgtttccaaacagcacttgtttccggttcatgccaggtgaccgttttcgcaaaccggtggaggggcagacggagacccccccctcacaacctgggatttggcaactaaaacaccccactctaacccgccttgccagtcgtacatacaaaagccagtatcgtttctgggtgtatcatcaagacaaagtcagaagctattcacttggaccagatcgaaagccgaaccctcgctaatgctctcaccagaagctctttcatgcataggtttcaagaatcaaggcaagtcattcgttcattggttgaaccaccgaagaaaaggatgaccaaagtacatttttgaattaaaccgactctgttagtgtaacgtttcttccaggcatctggcagaaattataaagatttttgatattacaccccaccaatagcccaggactctgattaaaatcaaactactctgcgaatattgctcaaagtctaaccatataacttggaatgtccattgattcaaacaagttgcagtaggacagaatatcatgaatgacagttaacctacaatcttttttcttgaacaaaaactaacaatctaagagagattgaatcgtaaaaacaagaacatcaaggcagaaagccgttgaataaggccaacatacatctttacatagggaacaacgagtatattgaacttaatgtactatctcgtacatacttcagaagagggaggaaaagtattgactaaagttacggcaatccaatcttaaaaaatttgatgcataagttttggctctctttgtaaggaaacctttgacatcagatcgcggtagcattacgatgctaatcgtagaccagagtgatctagggtcattgtcatatagcaaggcggctgtacgggagctgcaaaaagaaaataatgcttccaaccagagtcgaactgatgatctccacattactagtgtggcgccttaccaacttggccatagaagctgttattctcttgaagtcccgttgaaaaccacctgtatataatgaacttacgtggcacccattttcctttttttttttttttttgttgccattcatttcagttcacaggcttacagggcatattactggaatagtttaacagtataagaaaaatatacagcatatgatcagcaattcccataaatgaaacatcttccgtagactttttcttgaaatgagattgcaaatgagtatacatttcagatcaaatctttcttgatcataatcgacctttctgttcgcatgtttacctatggaaaaaaacacaagtcatgtgactctgcccactaattccatactcttgtgttaccgttggaatcttcgtattactattctacctaaacatctaatactaaaaccttcaactacgccggtagactcgaactatctcatttaaatgctattgttttacactcctgtttgcaagtgctttactattttattctccaagagttaaccaagatgtgttcggatgtatcaacattacccttggcgctatccgtcatacatcaaagctcgaatgaaaaagaagcctctccataattaaaaaaaaggattaatcacgtgacccaatttatgaacaagccgtcgaaaaccaaactctaattttaaactatatttaccaacagcaactcttatgtagattaggggaaaacattgcgaaaaggccattatattaagttctattagaccacaataacataccagaagaaaaaacatttactcgttaagggaccttcattatgctacaaacaatcacccaaaaccacaaacttttgttacgtataggagctgattctgtgaaacctgttttatataggagtacagtgcggaacaactcatggtggtccaagataatttatccgttcacccaggaagagaacatttcaccatcgcaatcatatgtgaagacagggaagaatcagtgttttttacctatcaggaacgacaatgaattgaatgacgtacttcttttcaacaaccgtctccccttaatcttaaacttcacctttagaggaaatgagacatgtaataaattaactggagcgttaaacaggattgtacttttagaaacggataagagaattaatatctgtgatgtggagactgatttcctagaaaccagagaagcgatgttacggtttggtgtcacacagatcccaaccttagttgctgtgaggaaaactttcccggtagatacattcactcaaccggatctcacttctcaagatgtgaattggcttcagttgaaaacttggatcgagaagaatgccgatgaatgagcagaatattctctcaaagtgacagttcgttttactttccagcatgtatgatctgtaaaattaaagatgatggaatttttatgtatcggaacatccgtctaaaaaaagtcactctaaactgtattggctaggctgcttctcagagggtcacctccaaaagagtagaaattcccgtcgatatgtgatgttaatccatgttggttatttttactgattcaaagcaaatttaccgctacctcgagctgctaatgccgtttccatttcaacatatttacataactgcgtccaatactaaacgtattgtataatcgtttaatttaatcaggaacaatcggtttggataatgcatagaattgagtcacgtgaccagatgatccaggaggcactttctttctgttcgacaggaaattctttgaaggtcaaaatgcattaacctgtttcaccacggtattttctaagtggactgtaaaagacctcccgctagatgagacaactttaaagtataaaatgtcttctctattctccctcagatcgacagagggtctaactcaatagcagtcagtaatacctcctattctaagtatattcatgttgcacatagaaaacaggatatgtttagctgctgattgccatttatacctgtgaaaagacattagattactccagttatccaataataaccaatacattggaattaggttgaacataattctaccagatcatcttcagaccgcttttctatccagtttgagaggtgtgtcaattgctcccatacatatatacacatttcttttttttttggatcgaatattcatatgatatttagttcacaagcgcctttaccataaaagatccaaaatcagggcagatattccccttgaagagttctaagtagtattgttcttaactgacttctttatggcgtgaaatctacgagctggtcgcagatttgatccaaatgacagtaatgacacatctctatttttctttttggttgaatcgttccttcttagtcacgtttatgaaaaaatcttacaaaaaaaaaagtcgaacaaaaattgaagtggtattcgatgaacaatttaaacagtagataacgaatgcttcgaaagctttatgtatcttaaatattattagcctaacccttttctgtttgttcttatttttttcttagcagtaacctctatcagagaaaccaaacgaaaccaaagttaaaatgtctcaacctcacgaagttgctgctgccactgaggccgtcgcaaatatgcatttggacgaacttactggtgaaatggtctccaagtccgaattaaagaagcgtattaagcaaagacaagtcgaagctaagaaggctgccaagaaggccactgctaaaccaactcctgagccaaagaagaaagcaaataccgatgcttttgctgatttggatccatctcaatacttcgaagctagatctagacaaattaacgaattgaggaagactcacagtcctaacccatatccacacaagttccaagtttctgttactttgccagaatttttgtccaaatatgccaacttgaagcgtggtgaaactttaccagaggaaaaggtttctattgctggtagaatccatgccaagagagaatctggttccaaattgaagttctacgttctgcatggtgatggtgtcgaagtccaagttatgtctcaattacaggactaccacaccgaatcttcatatgaagatgaccatagtctaatcaagagaggtgatatcgttggtgtcgaaggttatgttggtagaacttctccaaagaaaggtggtgaaggtgaaatttctgtctttgtttcccgtattcaacttttgaccccatgtttgcacatgttgccaaccgatcactttggtttcaaggaccaggaattgagatacagaaagagatacttagacttgattatgaataaggatgccagaaaccgcttcattactcgttctaagatcattagttacgttagaaagttcttggataccagaaactttatcgaagtggaaaccccaatgatgaacgttattgctggtggtgccactgcaaagccatttgttactcatcataatgatctagacatggatatgtacatgagaattgccccagaattgttcttgaaggaattagttgtcggtggtatggatagagtttacgaaattggtagacaattcagaaacgaaggtattgatatgacccacaacccggaatttaccacttgtgaattctatcaagcttacgctgatgtatatgacttgatggatatgacagaaattatgatctccgaaatggttaaggaaatcactggttcgtacgtcatcaagtatcacccagatccaaatgatgaaactaaggaactagaattgaacttcactagaccttggaagagaattaatatgattgaagaattagaaaatagattccatgtcacattcccagccggtgaccaactgcacactgctgaaactggtgaattcttgaagaaggtcttgaaggataacaagatggactgtgctccaccattgaccaatgctagaatgttggacaagttggttggagaactagaagacacttgtatcaatccaaccttcatctttggccacccacaaatgatgtctccattggctaaatactccagagatcaaccgggcctatgtgagagatttgaagttttcgttgccacaaaggaaatctgtaacgcttacactgaattgaacgatccattcgaccaaagagctcgtttcgaagaacaagccaaccaaaaggcccaaggtgatgacgaagcacaacttgttgatgaaactttctgcaatgcattggaatacggtttaccaccaactggtggttggggttgtggtattgatagattggccatgttcttggctgattctaacaccatcagagaagtcttgctattcccaactttgaaaccggaagtcgtcaaggaagaaaagaattagcaataatatattcagacaagcattttctttaaccaacaactcttttatagtattatattaataggaatatcgatttaattaatgcgaatttataaattactttatcagctatttgcatatttgatagacatgaagtatttttaatggattatgacagagattaccatggagatgctatattgcgcgagtcattttacctctacgcttcagctcgagagcttttttatagggtgggttggtaggagactgtacaggatcaagtgctggagtcgaagtgtcaacatgataagtagcatcgctgtcaaaagatgaaaggccaccgcatgcaatgaaagtggcgatggaccttggttcttcatgatagttgggacatttatcttcaagcctgagtttaccgatatcgcatccctggaagaagtcttctactgaagaatttacatctaattttggttcccagtttgctggtggattgtaaccaaggcagacgataaatgattctaatgatgttcctcttgaagatcttggtttagcgcaaataactttctcaaaaagatatccaagctgagaatacaacatgtctatatctcttcctctaaatattttggcaacaaaatttccaccttttcttaacaaacaggtagatagctgtaatgcgcttaaaattaactgctgttgaacatactcgtctaaatcgtgtaaaccggtgacatctggcgcaccatcgctacaaataaaatcagctttcttaccctcaaaaagctcggttatggtttgtagagttttaggatgtgtaatatccgcctgtaatgtgattacattatcgatcggtgacatgggctgcaaatcaactgcaacaatctttctatctgaattatctgaactctgaggaaatagtcttctagacaagacctgagaccaagatcccggagcagcgcaaaggtccaccactcgtacagcctgctgcaaaaaatgaaagtcgtcgtctaactgtaataacttgaaagcggatctcgcacggtatccttgttccttagcctttctgtagtacagatcacgtttatctttactactcttccccattgttttccttttgatgtcttgataagccttacttaattttccgtaagtatatcggtttacttcctaaatcgaaaatcgccttgggtcgccttccactgaatacttaactactcgcgacagtttatcttcatttaccgcttctatcataaaagctgtaactggatttcagttttcgaagcttcaaagcttttgacgaatgttgaaaaattttaaagtgatacatggttttaacagtgaagaaagtataagttcgatcgaattaaagcttatagcgatcaatccgagtgtctattagcgtgggtagtaccagtggataaatttagtatcgcatagaatgaacatgttcaggcaggctgtacgtagtttcgtgaggtaccaatcaactacatcattaaatcctaaaattcttccattcaatgccaaggagactccaatcccaaaatgtgtggaagctgtgtaccatgcaccattgaagatcgaaccaacacaccgtgatttgatagctgatatccaattacgttcatatgataatgaaaatctagactttttctccagttttgttctaagagctggttattatttaggaattccaatgaaagggccaaaaccactaccaacaaagagaaaacgttggactgttatcagagctccattcgtgatggctaagtcgaaggagaactttgaaagacatacacatgctaggttaatccgtctatacgattgtaacaccgaattggtagaaactttattatcatatatttccaagcacggtatcagtggtgttggtatcaaatgtaacttatatcaaagagaacctatagatttggacagtaaaaaagacggcccggagttggagaatattgatatctcgtcccaacttcaaggtctggatgacgttgttggtgctaaggttgttgaattattgaacaatccagaattcaaaaaacatttgcaataaaattccagtccgaacgactggcaccggtccagcaaaacaacatgcacatatctataatttcgaaggcctgtatatatacaacaataaataattcaacgagacgtacccaaatctctatcacatatattatgtatcgatttatccgtacatattgaaatcctcctcaagttcacattgagatgtgtcaatttcgactttctttgacctgagatcatctctgcacatgggacatgtatggttgttctgtagccatatagataggcactctagatcaaacttatggttacagcgaggaacttttgccactaaaggatatgggtcgtcgaggaaattgcactggcatatcgcacatgtgtcttctgcctttaacttactattgggcaccctgggcagtgagtctatataagtttcagacattcctttctgctgatcgtcttgatcaaattcaagagttgaaccaagcaattcttgtagtgctgctatactatcaacggaaaccggttcatttgaaagataagcacttctcaacaaactccgtaacgcctgctctggagttgacataacctagtaaaatatgatattgaacgtatttcacgaattaataatcgtttactagaaatttaaccagactctcttttccctgtgttagtccttgacaaaagcgccaggttaagatcttcattaagaatgaattaaggtctttactttaatctgtactttcggaatcggtgtttaaactgaagagacaaagaaaataaaacaactgataaaagcctgatgaggtgtatgctctgggaacgtatattggttgttcccattctatttggtgctaattaagatgtacctagcgttacaaggttttatatacggtcagtattattattatgtggttgtatttcttttttgtgcattgtattaagttttgtaattattaggaatcatgattattgttatgttcataatgggttaaacatccttctgtcccatattaggacatcagcaggtttgttcaaaatggtttgtgttcctgtagagcttccattgaatctaattgacatcgaaggataataattggaaatgtcttctaccaaatctgtttcgatgaagtcagcatctgctcctgtaataacctgagcattacccagtgcacaagtagcattttcttttatatagcctatgctgagagatgttgctttcacaagttgtagaataataacgaatatcaaagcaatggataggaaacgtacattaaaaccagatttttggactgcttcttgtggcatctgagtcggcgagtctagaacatgcatttggaaactgtctacatcttcgtacgcatatgtgggactgccaatgagctcagctgagaacattggccaaagaaccatttcgtacaattgattaaatgcgaatagaaaagagtaaaacaaaactccaagtgaattcataagtagcgaatgtaataatatttgatgttagaaagtcttcggaaaaagcaaaaccgaattgatggtcacacagagagctctggaaaatagcaaatattttatgaatgcattggtgatttcagatacacaatcgaccgtatgcttatatttatattaaaatacgactttcaagtgacataaaagaatgacagcctgtatttacaccacacgtaaggctgtcacaacaaaattgtgtttcttgagaaaaatttcaattgaaccctccgtcacaaatccagtgtgtgtctgcgacgtgaagacttagacttagtatgtaaatcggatttagatcccgattttggtttgccctttttcttaccaggttccgtacctattattttggcatcttttgtaataattttctgtaccaaacgatcccattctggttctgagttcacattattgacatcaaaatcatctgatagacaagatgttatatggattctatttcctttcatcagaaggtaacatttctccacggtgggtcccactttaaactttggtagtatcgatattaatttttgtgtccacaaatccggatcttgtttgaatgttaaagttgcgatcctaagtttcgaattcaatttcaatgacgtattctcacgctccaaattattattagtagcgactattagctgggaaacaatctgagactctgtcagattagggtctatattgtataggaaaaatgtatccttggtatcgttgacattggagttaaacggcagttctcgaactctccacttccgaatggattctgcttgtttcaatttatctatattcaacggtgctacttgttttgagcttagtccaatgaaccttttcatcatatcattcttcggaatcactgaatccgcattctcgttcaacaattgtttcatcgaattccttaaatgcatcggtattccatgttcgaagtcgttcaaacaaacttgacatatcagattcttcgtagcacatttaggacagcatatggtatgaaaagttgtgtggtttattgtgtacgagtatgaatcgaatgggaaggtacaaaacttacattctctaccattggggtatcttatcaaagttggggtgttttcccctaatggcaaacaccgttcgcaaatcttcaactccccagtatcctgactcatgttcacctgctcgttgtgctctgctggcagtgccaccgatgacaagatcaacgaactcgacttatattaatcagatttctttgataacatctcatcgcattggtactattttttttcaaatttcttttcattctttccatagtgaaagtattaccttgcaatatgcagcggatacttaattacaaaagagagatgagctttactaagagttataagaatacgcacatagaatattagagaaagtgcgatctagcagaatgtaaaaggatcagggttaaaaagctatgtcaaaataaggattcctcatgagttgatcggttgaagaaattcatgttgttgttgttaggtgtatcatcataaaaagtttactgtattctgctttctcgacactttctcttagttgcaagtatatagattagaagaaggtaagatttccattgatcgcagtgagcaatgaaaatatatcgaggcctctcgatatttgtatccttggtgtctttcggaactgctactgagtataataaaagtaaaaaactggttatcatcaagtaaccttgagtctaacttacagtgacaggaggtctctctcttttatacctgttggtaaaaattttcttgggcctgaaattaacaaatgacacccatacactacataatgaaatatccgggtaacaatatatgctctagtgcttatttggcacaccaagctcaagaaacggtacaattttgtatggaccatatagattgtgaaggttcaacatcagccatgaattagggcaaagcgtgttatataattacacaaaaactatttagagaactaaatgccaaaacgtttttgatacgtaagatataaagagagcaaaggcaaattcatagtgacgagaggtcaaatttcttagtctaattatatgtgaggtttaactaaacttaaggttggtaattacctaaaaagaggataccatggaagattttaatggtccaaatttcaagtaagaatgatggatcactacaacaaaacatagagagagtatttgctgtggtgatgatgcaagcagtacacgtttgggtataatacacaagggagaaaactttatgaggattttttttgtttaattggttttaatctgtatcctttggaagcgtcatggtatcaagctccgcgtatttattgaaggctgttgttcctcgggcattgggttattcttgaaatgggttctgtaatgttgtatataattatcgtgccttgagaatcgttgattacaaccggggaactgacattgatgacgcttctctccggtatgaattctgttgtgacgggcaaggtgacctgatgtagtgaaccctctggagcaaatcttacagatgtattttctcctttcagctaatggcaagtctttagtgttcgactgtttacctgtgttggagattttatgctgttgacttgcctttggtttacggtcttgccgactagaccttttacttttcgaagcaattggagtagaatacgaagaagaagaaggcgaggttgatgtggaagagttcattgagccagcaatgttggagcgtggaatgtcattattggagattacgttatttttccccgaatccaatgtctctacttttacatcatcaccattggaaagcgaagaagtcgagctcgagaaactgggcttttgttgatgagtgggagggagtaaaggttcagaaccaatgaagtaatgaccttgacttgggttatgaatttgagtctgggtttgaacttgattatggtctggtcctgtgaataagaacctatctaatgatcttttggcttgtagttcggctgatgctgtaggaggtggaagaactaatggtaacaagggtgacgatcctgtcgccatagaagaaatagatagtgatgatgcagtagatgatgaagagtgtgtagcccccatcataggaggaaccccataagggctatggatagccatatgcagaggtggtagaaccggcctcgaagtattttggccaattgtggaagccactatgctatagctttgatgtaccggtgctccgtattgatcatgaacgatgttggaattagttacattgttcaagttaccattgaaattgatattagcgtggatattatcagtagcggagttattacagctattactgctggaaccccatgcaattccactcgttagtggcattttttgttcgacaacagacataatcttgccgatcagctcttctctgattgaccttaaacttgtatttttgaaagctttggctggtaccttgtcttctggctatgtgaaactgaaagaaccaaaggcaaaaaaaacaaagaggagatagtacaataaggagtggatctaagttttcaagaccctgggtagaaccatgtactgtaaagctgttctatagaagactattctctttctctctgttagactttactcacgttaatgtaaagtgtctccggccggattaaaagcttcagaattaggaagaaggaagataggatgatgatataacaatttaaaggaaataatataacacaaaaacccttcttttgaaagacttgaatgtttgtaatgtaggtaactacgcagaatgaatgaaaaacctaaccacgaaccgataaaggacgtaatgattaactggacccaaatcataaaaagcatccacatatatatatatatatatatatataaactgatcagggccgagagataaacctatagatacgctgtgcctagcacaaaatatgtgagtatctccaaaatgctaggcaaatattgagcggtttttggaatctactttttcttttaatagagaaatcagtacccaaagtcatgtcaaaaaactgtgccttgcccacatttcttaaagacaggtagccatgaatcaagtgtccattccctttcttgctcatatagaggaactatattgaaggcatgctaagacctaagaatccaccaccgtaaaaactccattctacatactaaaatcaaaggaaattaaaaagacaaaaaaaaaaacaccgaagggaaaacagtgtatgatcctttggcaaactccaagaacagctcacagcatgattttccctaattcctgcaaaaaaagagaggaaaatgcgaagatccagtgggggccgtaacaacggtgtacgagttattcctttgacggcgattagtaaaatattagaaattctacacaaaaacatggatagtttgttttcttctctcgagcgacgtttgtttccttggtgggtttaaggaaaaatatagccacgcactgaaaactccgcaggacgcggagagggcggatggtaaagtttacgttatttcgtacgtatgatcggctgaagcagttatgtttcaagttccttattccttacacctactaaccttaactcacaagcctcgttctcattcttgattcttagtcaatgggcttaggaccccgtttaccatacagaattagtgttcttggtggtggacctacccccagccacctaaccacctagccacgcattgtaaccttattatttcttaactatgagagattttatttcattttcttaaaactaaacctgtacgaaatgggaaacaaagcaaaagaaaaaaaaaataaacccaacttcaggaatagattgcaggaattggcttttctcagtagataatttcttggcaaaatgtcatttccagtgtgcatgtaggtatatgttgtagctacgtattcttttttttagacaaatatgctcctggtcatggttatctttaaccaatacacggcgagagctgattactctgtcgttaatgtggagagctgtgtccttgtatgctcttctggacaagagactagatttccattctggcaatcaatgacaccgtgctccagaagacggaaaggagaatgatgtgtctttgtttatctaagaatgctcctacgttcttatctaaagtggcggtccctgtctgggcaacaaaaatcgatagccaaagagttgttccgggagaggtctagatccctgaacagccaaactccattttctcacatttttttgtgattctgcgaggaaaaagaactcaattcagctttctttttcatttgcgtcgcacggtgtaatgtgctgtaggtccctgtttcgagaaagtgttgagattaggatggaaccggctggtcaagggtttactagaggaatttttcagttcgccgattcgatgcttaatgctctgtcttggttcatggtcgtggtgggtgtttttttgctcaatccatggaaataacaaccggtatgttgccagaaacgttagttattaaattgttggtagattaaacaatcttatctaagtatacttttggagctaactggtgggcactatgattgaaactagcagttcaaaaggaaacttagaaagaatcagcctcaaagctcggcagtttcccaatcaggggttcgctccactgcctctgtgcgtatattcccattattccttgttaaagaacggaaagctaagaaaaaaacatgcatggttgagtgaggtttcatccagattgaacatggacccttccaatcttttgctttctctggttctttttgaaacaatcgttggcgtttttccctacgaactttctgagcaattctcttacatccgctattcgtagatagaagaatattctaaaaaaaatgtaaaaaacgagatgacatcacttagatgatgtcgtagctcatatgatccgtgtaagtgcaacttttcgttcctttctcaacggatcaatggtaccaagaacccggaacaacttccacaaaaaaggcgtagtaagaatgttattttttacaggcatcactccactcgacaaaagacctagacaatttccaaaaacattccattgaaaagggtttttcttatttttcattgaaatgtaagtgcgattagtttttctgggcgacataccccgacaatattacgaaagttacgaaagtggaaactaaggtgctcggggaggaagaggatttcgaaaaaaggaagtctcggccgtacctgaatccgaaatcacatatgtttatccggagatagttggatgcgcaattctgactggtagagaaaagcatagggaattctaggcagtgccatggttatacgacaacacgacaagtacacctgatatcccttctcgaagtacaaagcataatatgaccgaaagtgagagtcttgggtgtgcatattgtgcaacatgtttacggtggcttgggggaggctgtggttgtattaggaactgttggccggctctctcttgtggaatgttcccggctcatagatcaaaattcatcaactttctattttcttacgacgaagtttgttattattttttttggcatggaaggaacgcgatcttcagcttgaaataagttatcactgaaaaacaaagccagtagaaaacatgagcacagtgtattctttgactctcacggctacattacaagaaatgtatctaactgtatggagctaatactatttgataccatactaccaaggttcatgttaacaagctagtaggtctattgttttctaattgtttctgtgtatattgtattccaatcggcacttacgtggcatacacggaaagaaaaccaggaagaccctttttctctcatagaaagtcatgagaatcataaactgaaaagaggaacgatagggattcgaaccccggcttgttactgctcacctgtcaacacgtgatcccgacttttataaaaaagcaaaaaagcggctactactcatttctcgaaacttttcagtttgcatgaaccctcgaaccgcgcgctcggttaccacaaacacatcacctaatatgcattagcctaagctgacataatcaaaatttcgtatcctagctgtcattcatcgtaactgccaacctcgtattgataataggcacggtactccgagcatatcactcgatagccttttcttgacccaattttactcgctccatcaatgtcgtatcttgaatgtatgttggttcagcctctatttctctcgtagatagtagtatgttcgaatggttccacttgacctttttttttcagtatatacggtttaacactaaacgaatgctgacgcctatgtctccgtttcagaccataataatgatacagtagtgtattatattcatcttgtggtgctcggactgccactattgtgatgagattcttgtatctcgtatcttttcctcttcctgtatgcggtggaaactagctagccttttttcttcaattacctttatccaaattatcaccaggtctgaatcttgaagtctgcttgctttttggattttttttttttgactatattaacgaaagtgaattattccattcgactcaccaactgaaatgagaagagaagcattggatctatactgcccttttctctccaatcaagcagaatcattgataaaactttacatccagtatacttgtctggtaaagcaaacagaaactcaacgaccggttcatcttaacacacattctaaatattatcattgtgcgatgacagattcacaagtgccaattagagagagaatggaggccttagtgcgccggaaacagcaagaaattaccaagggtctggaaactttggatactgtaaagtttcaagccgattcttgggatcgtggcaacaacggtggtggcggtgtctcgatggtgttgcagaatggtactacgtttgagaaaggtggtgttaatgtcagtgtggttcatgggaacttgagtccacctgctatcaaggctatgaaagcggaccacaaaaatttgcatctgcctattgatcctgcaactggtgaaccagatgcaacaggagtaaaattcttcgcctgtggtctctctatggttattcatccaattaatccacatgcgccaaccacccatttgaattataggtatttcgaaacctggaatgcggacggtacaccacaagcttggtggttcggtggtggtgctgatttaactccttcttatttgtacgaggaagacgctaaattgttccatcaattgcacaaggatgctttggacaaaacggacgttgccttgtacccaaaatacaagaaatggtgcgatgagtatttctatatcaaacacagagaagaaaccagaggtatcggtggtattttctttgatgatgtcgatgatcgtgatccaaacgaaatcttgcaaatggttgaaaactgttttgatgccttcttgccatcttacctcgaaatcatcaaaagaagaaaggatatgccttacactgaagaagaaagacaatggcaacaaattagacgtggcagatacgttgaattcaacctagtccttgacagaggtactcaattcggtttaagaactccaggatcccgtgtcgaaagtattttgatgtctttgcctgtgactgcttcgtggttgtatgaccatcatcctgaagtagactctagagaagataaattactccaagtattgaagaaccctgttgaatgggtttgaatgcctttatttatgtaacgtctcatgtatttaattcttagtttctaatgatcttaatttcttacgcttcaaaaaccaagtcggtcgttagtaccatacagcgttgcacgaaatggttctgtcaggccgtcgacaatacttttattttgtcttgttcaatctatttgtagatttatacattatattacactttgattcagaagaagtttcatcaaaccctaacaacttccttttgcgagcctaatgaaagcgtgatctacctttcatcatttgaaagattaagcatgcgtttttagctgggcgagagacaaatggcagcgattaaagccgaacatttatcttcttgtcagttttttgctctaagcgatgtaataactgctaagaagatctataatattttgtttgatgcgtatcgaaatcaaagtaaatttcaaaaatacacaatctctagttctctctccatttatgaccacagttaacacatttgtagaaagttgtcataggttcatctgcagatctgatttgcaactggaagaagtaagctctttcacccgcacattggtcatggttcggacattgtgctgctgtctggtcaacattatcccatgcaccttctccacctaagacatcatcaacttctttcctagggaggttctttctatcgtatacctctatcccatcaattaaaaactggtatgggcatgatccgcatgctagtttatacagacctgaatcagcttttgataccaacaacatgttattgcataatgggcaaaacgaaagcatcctacaacttaattctcaatgtcagactcctcaaacacgatacgttaacgcaccgttacctgcccataagctccttcaacacgttatcgcatacactctaaaatgaacctcatcgctataattattgagagtaggttttaattctttcctcatctcatatagaaatttttcagaaaaaaaaaagtagagcttcatgcctttaactttgaatcgatatttatgttgacatttaaggtttgtatgtcaaatatagtgtatagggttaatacctgtgggcgaggtttgatagaagaacaactcccacatttataagttagtttccattctctagactttagagtatttgattatcttggagcggttaaaccttgaaaacatgacgaagaaagagtgcagtgataatgaggaagaagaagaagacattgatattgtaaatcaccaagacattttcatatcaccttccaaagtaagatatcagtcaccgaagaaacttaaaagttttgattttctttcgccttccaaaacggtacgacctaagtcacccaaacgatcgctcacattagagtctgttagcattgagactgaatataaagatgaagagagtaggaagcactcatcgacagatactgcaactcccaggcgaaggcaaaggaaaacaaccaagagggtgaagttggaggaagatgatgccattgactatgtgtcagatactaatgaattgatacacaatgacgacgaatacgaggatctaaaaattaaaatagattctaatgaaagctcacctaataagtcgcctaggagaaaacttacatttaatgcagaaccatcaccccaaagaaagactaccagaaatacagttcaaaggaataaaattatagacgatgatcttgcatacgacgatatccagcagtataagcatctgaaattgaacttgaaccctaatttcaaaccgactaagttgccaaagagcgataataatgaccaaacatctgatgaacaatctcaaatatattttttcgatggtttcgaaggtttcatagatcagaccaagatcctaaaaactgataaaagatccaagaactcgatgtcctcggcaccaagtatttccagagatgaatataacattctttctcaactttccaatgatatattccatcgttcatcgacaaaggcagtacaaaaaatacatgaaacactctttcagcagtttactttcgagttactgcagggatttacgttattattctatggtatcggatcgaagaagaaattcctcgaatcatttgcattcaactttctttctatgaagatcgccttgttgcaaaacccggatattcaaaaagatgatccatgtataccggtttttgtaatgaacgggtacaccactctctctaagaacatctttttggatatattcaaaatcttagtagagggcgagactattgatgatcaaggtcaatcaaattattgggataatcgaattgacttgcaaatggacaggctttcaaaatatttcaagaaaagacctcctacggtgaagatgattcttttgatacataacttggacggtccgtcattccggagagaacattttcaaaccagaatgagtattcttgcacaaatcaaacaaatctgtgtcgtagcaagtgtcgaccatatacaagctcctttcctttgggatcatttcagagctcaatcattcaactttgtttaccacgatatcacaaattttgagccgtacatcgtagaaacagtacaaaccgataatgctatcgacttttccaaagattcaggtaccttgtttaatgcgaacggtgctaaatacgtactagaatccctgacggacaattctaaaagaatgtacaaaattcttcttcaacttctaatgggacagattaatgccaagaacgagtcaaagcctcgtgcaaaatctagttccttaaacaaaatcacacctgggattgagttctctgaactttttaaaacatgcaccgaacagttcgtagtctcgagcgaaatgggtcttcgaaccatcctatcagagttcattgatcataagatggctgtcaatacgaaaaataaaatgggtaaagagatcataaatgttaaatatagctatggagacatggaaaaaatgataactgagatagattccatgctgcaataaataatccttatttaaattcaccatacatatttatatttatactctagcgttctgatctcatttggctttaccataccgtccaccagggttcatttcttttacatttcctatgctgaatcagttctgcttccgaaaatcactgaaaaataagttttcgataaagattactattttaatgaacttaaggttatatggttaagaagaaaagggagaattcgataaagaagagtatcgtatacactaacagcaagtgttggaagcactgttggtagtggtatttaattcagcagtccgctaaatattgtgatgagcaaatcagacactatatccagaccgaattcggtggcacatactgcggcgacctctgctatgattccgaattcgcatctgttgagtcccaacactcaggttgttgttggcactcataggtgtgaaattttggagcatttagctgagggtgggttcgcaaatatatacaaggtaaaattcttggaattgactaacgagatggatgctggtatcgattccaaactgcttaaggcaggggacatagcctgtttaaagagagtcattgtgcccgatgaaaatggtttaaatgagctaaggaacgaagtagagaccatgaagcaattgaggggttctccaaatatcgtacagtactatgactctaatgcatcaagacatccagatggatctccagggttcgaaattttattgttgatggagctctgtcctaagaagtcattgctggattatatgaataacaaattggcaacgaagttaactgaagctgaaatattgaagatcatgtatgatgtatcgaacgcaattgctcagatgcactatttacctacgccgttgatccatcgtgatatcaaaatagaaaacgtgcttgttgataaggatgataatttcaaactctgcgatttcggctcaacttcaatgtgttttccaatcgtatcaacgcatcaagatattgctgtacttacgaataacatttatgtgcatactacaccacagtacagatcgcctgagatgattgacttataccgctgtctccctatcaatgagaaatctgatatctgggctcttgggatcttcctctacaaacttctattttataccactccatttgagctaactggacagtttgccatcttacattcaaagtatgaaattcctcagaatggatactcatccaaattgataaacttaatcattattatgttggcggagaatccttcactaagaccgaatatttatcaagtcatgcatcatgtatgttctatcctgaagtgcgatgttcctttcactgataaatacgaattgggtccttacgattttgctaaatactctcaataccacttgaaattgcaacaaatacaataccaaatgtttgagctatataaaaatgagaaggtaactagcggagatgtcgataagttgaacgatttattcattcaaaatttcgagatagctccaaaacaaccaattgataaaggtattggatctgtcgaccaacaagaagcaccagaagatctggaaactgatattgctaaaatggacgaatgttatccaactgtggaaaagttagaatctgctaacgccaaggagagagatgatcatcatctgcaagtactgtccacctccctcaagcaatcgagctccagaagtatatcggatctttcaaacaaatcacaagtatcattggattcaaatgaaaggcacagttcacatggtataagggcgccctctccacttccttcgtcacaacagccacagaatactgcgaatatgtcggctgctagacagcataaacaacataatccttttcaatcacaattccagcctgaagtggatgcatctgagtactttgatgcgaacaacgaacaatacttcaaaggcactcctcctgcacatccaaaaaatgaaaagaatgtatcatattttcaacaatctccgatgaaggaaaacaacctaaataacttgagtatccaacaaagtgatcaagcccgtacttttgatactacaatgcctatttctgatgttccaaataatggcaacgtcgtgaatgacgaatacctgattgacatttccccacccagaaataacgtaccctattctacaccagccgcaattacagccaatatgcaagatcaaatcatttcatcgcaacctttatctcaatctcaatctcaatctaaacctcagcctcttcctccaccccaaccccaaccccaaccccaaccccaagctcaagctcaaccgaatacacgagcttcactgaggcctgagcgccagcagcaaattcctgctcaaccacgattagaccttacttttgatcaacttgatctttcaaagaattcattgactaggcagtcagatacagaactagaagaaagcattatatcagatgaaagcatttcactcgatttgaagcagccgaaattgaaggagcctgtaacccaacctcgtcaaacaacatctccagggtctgagagtaaagaatttctgaaacccgccaaagttcctaagcgtcggtcattagacctaaaatatcaagaaatcaatctttcgaatgatgatcaacgtaagcatcgaaaaaataagacatcattttcccgcaccagtgtcagaagatctgtagaaatggaacgcatgaaacatgactccaactctacatctaattctaatgcaagagacgaaaccaaggagacgaaaagaagatcgttctttggtgtattcaaatgataggtaaccaagggtaaaagaaattagttcatccgatagcataccaaaaaaaacaacctgaactgattgaagcaccgatgtccttattcttttaattcaagtcaattattgtataaacggtatgtacacactttgattcttattgtcattcggcacgtctctcgaccttttttaaactttacatttcttaaggttgatgaaaaaccaatatttacattgaagaatataagaacagaagcaatacaggtaaattttggttgatcagtaaacgatatcctgtaagaaggcgattgtaacattgaactaaactacactggagtcaattttgacttatagaagggaatacgctgaagataagaaaaaggtagacaatggctgcagaaaagatttatgaaccatacaagaagtctcgagggactatgatttacacaccgactaatcagcagatgtcgcgtggtggcataggagaaaagttggctgatttcgtgaagaatctatactgggtttattatatccatcttcccttttatttaatgacttcacttgatgcattttgtttacacactatatttctggttgtagtcagcctgagcttatttggtttattgaagtacattttcctatgaaactcgaaattcaaagtttctcaatcgaaacattagcatacagagaaagagggagcaagaccttttttagcgcattcgttatcaacgaaaactccgatctctaatccaatcaacacatatccatgacaaaaaaattgtcattaaattgaagcaaaccatttcttatcacactcccttttagacaagtcctgaaggttcgacaagagtaaatttgtttagaaagtatgggctatataatctataaaaacggataaatatttagaaatgtatcacggttatttcgcaggtgatcatgacttcatatcaggagccgttttcccggttctcttgtgtttgtttttgatgtttttataatatgtctacgagaatcacccaggaagcatgagttaagccttgctttgttcgaactctttattaactcttttcactctattgtataatacgacatcatcgtgggtaataaaatcgtacaagactttacaccaggaggagtgctttggcagatgattataaaattccggacataaactgttcaattcccaaagtcgggaccaagcaacaaatgggaaatcatgatgttcattgtgtaaaccgacattccaagtgaagaagtttagaagcccataataagaatacgtctccaatgcgtactttttcctgaattcgacgtcttctcttgagacgtttgattcatcagtgacgttaattggttgtctttcggctggcgttaattttagcatcagtttaccaccgatgatagcttcttcaatgttcaacagatagtgttctgcaatgaaatggccagagcatggatgtagagaaccggctaagaatgaggacatcaggaaataacagtatgaataccaaccaaaattcgcgatccatataaaattgaacataaattggtacaacacgttcaaaaggtggatgtaggtgaatttgatccttgtgacaaacataggtctaaatgcgtagaagaagatttggaatgtggcaaagaacgatttccccaagatattggataaaagcacagcctcaaacctggtagggatatccgtgtcataaatttcatctccaagaaacttgtgatgcaattgatgatatggtccaaatgacgcactgtatgggataccaattggggtatttgtgaaaatggcaaacaacttgttgtggacaggtttcttaaatgctaggttgtgagacaattcatggattgccaagaagatattctggttagcggtagcaccgatgacatatgcaatgatgaaaaatttccaagtaaaaggatgggtatttcttaagtaataggaaagcgataactgaagcgacacaacaccaatgataatccatttagtcaaaggttcgtggcccataagtcgctgcacttctggatgtttcttaattatggcatgtcttcttatagcatggggttctttatgtgcggaccagtagaagttatcaagaactttaaaatcctcatctgcacttggaacgtcgacaaatttctcagagactttcaaatctctatgaacaattgtcatgtctaagggtcttaatgaagctctcttcttgttaagatagcgattccgatgctatatcaaaacttgaaagtaaaacaatgccgataaaaaaacaggaaccggaaacacgcttgacaaaaatacagttcttgatccttgattccaagcctgcctagaatcttattattgagtttgatactgatattctcaatgtaaccacaccagttggatcaggtataaatcctatgtttatgcgtgactatttaaaagaacttaagcttttaaaatttaaaatctaaaatccttaaatcccgaaaaagaactgatcttatgatgtgataaattcaaacacatacacaaacctaaacgcaagcaaagcctgctaagaaatgtggtttatacttagaaagaaatctgtaattggaattacaatatatctttaaacgaacaaaaaccatgcgatgagatgttgctgttccgtgtgctctcgagcgatagaaagaaatttttcattacgctttaagggaaatgggaaaaagtacggtcacgtgaaacaaagacacagagagggaacgccctgttctaacatcagacacagggttggtggtaccaagggccccaccaatatctgtttaaccattaaatatgcaaaactgatatatttcgatccaatcctgacatactctaaatcatttcaaatgtcaaacgatgtgacaaaccgctgcaagattatggttcaatcttatacaggatttgcttccaccccggatgaatgcaattatacgcgtacataagttctgtaccccctttgctaccgaccttaaattgcttcgcagtttggctatcttgtcttattatcccctttcaagttggagaattgctcaatccattaggtactgaaattgttcaacaatcgtagtagctttttttttttggtcactcactattctccatctgctgaaacaaatttgaacctgaacattgagtggaacgaacttgacgagaacagaagaatggtagcagtctccctttaattgctgcatacttaacttacgttgatatctttgaccaaatatatctatatataccgagatctacagcgtcttataatatcctggcgggttatcaacatcatctattatacccatttttaccatagcattccataatgttgaggcattcctattgtagagcacagcaacagtcattgagacacgttttgaagaccagattggctgttaatcaattaagatttatgtctgaagttaagtttagagtcgattccactgccagagtggtcactttggatagaccaaagaaattgaacgcattggatgttgagatgtgcagtgccatcttgcccacattgcaagaatatgccaagagtaccgttaacaatgttgttatcttgaactcttcagctagtcctagggccttctgttcaggtggcgatgtagctcaagtagccaagttggttaaggaaggaaattttgattacgctagagaatttttcaccaaggaatactcgttaaacttggctctagctacgctgaacaagccggtcatctctatcatggacggtatcaccatgggtggtggtgtcggtctatctactcatattccattccgtattgctactgaaaatactcgttgggccatgcctgagatggatattggattcttcccagatgtcggtgccactttctctattccaaagcttaccactgttggtggttccaacggacaattggctcagtacttgtgcatgactggtgacattttgaatggtgccgatgcttacgtggctggtgtcgcttctcattatgtgccacatgatcagatctccaacttacaggcaagattggctgagttacatttgactgaagccacttctcaatcgactaaccgtgatgatgaaattttcgatgttgtcaaccatgctattgaggaattcaacgcaccattaccaagagactacaagttcaagtacactgctgatgaactaaacgtcattgaacagtgtttcgatatcggtaacagtttgaagcaaatctactccaaattggatgaggtcattgctggaaagacagtatcacaaacagctcaggagtttgctgcaaagaccaagcaaatgctagctagcaaatcccctgtttctttggaaatcgcaaaagaacttttccaaagaaactccttcactgacattcaaaccgccttgacccaagatttgatcactgctactaaaatgtcagaatctccggacctatgtgaatttgctgaggccactagtcataaattgctagaaaagaacaagaccccataccaatggaagatcaaagatttgaaattagcccaaatatcagttctaatctcacaaaactcctcaaacccggtgtcgttgatccgcccatcaaatttagttactttctctgaatacccacatcatagcaagtaccaattaccaaacgaaactctagttgagaaatatatcacaggtgctgacaaccatggaagacaaactgcagttactaagaaggaagctgtcaaattcttccaacaattgaaccccgccacgaagagtaagaccggcgtagactacttggtaggttttattattgacagaaaatgtgttccaaacccagatggtttcttaagatggaaaacttcctctgctaaactataaaaactatacatttcgattatatagtacatcgaacacttgtaaatacacttacgattaacctacacgcaataaatttcattatcctctcttagaatggcattgttcttcggcagtacataagggtgccataagttaaatacagctctaattgatgcgttctactttaaaactcgttcatctacctaattctttgttatattttccataattacggcatggtttaaaatttgaaattactggagtttgatcctttaaaatgagtgtgcaagaaatagaacatcaatatataagaacaaagctccacaacgcatcatatctgccttcaaattaaagatgtctggttctgatatccttgatatcaatgtacccagggtcattgatacagatgactgtgtttattgttttgaaacgatgaagaataaagatgagggtcgtgaacattcattattcatctgtctacgctgctttcagtctttctccgaagagcattgggaactacatcaagaggttgttttgagtgagactggttctacccatgatctgtatctcagagtattcaaggttctaaaaccaaaacaagagcgagaagaagctggcacgccaccattggaaaagaaattaaagcttgaggttaaggatgtgaatgaggatgatctatatgatacccactggctgcttggatctgtggaacatggagaattgttatcttcagacactccatctattcctaaggaatggagtgacaaaattagtgaaatcttgcaaacaaaatcctcatcatatcaagatatgtcaaatacctggacacttgaattaaagtcatgtccacacatacagactttcgacttatcgaacttggagaagcgagaaggtggcatttctcaaagctgtaacgactgtggtcttacttctaacctttggttatgtctccattgtggaaacgtcgcctgtggaagagagcaggttgggatagaggggtactctcatgctttgaaacattatgaaagcacagatggccacgctttagcgataaaattgggctctttgacagctgatgcagctgatatatactgttattcttgtgatgaagatgtgaaattcacccataatctgcagttgcaggatatcttgaagttttgggaagtcgaagtaccagccaagtccaaagaaaagacattggtggaattgcaagtggaacaaagtctgaaatgggattttcaaatggtagattcacaaggtaaaagtttaaaacatctacaaaatggtcctgaatacggtttgggcttattaaatttgggcaattcttgctacctaaattctgtattgcaagttttacttaacggtgggatcagaaattggaacctagatggattaggatcctttcctacagatgtcgtctatccaagaacgaatttacactgtcaactaatcaaaatcagaaatgctatgaccttacagcaatccagatatcctgagggtattaaacccaccactttcaaaaaggttattgggggctcgcatgaagaattttcctctggaagacagcaagattccttggaatttttttcctatctctctgataaattggatagagagatatttaaaaatactactaccaatccaaacgatttgtttagattcaacattcaagacaagattaaatgtgacaattgtaacaaagttaagttcatggatcaagtttcagaagtcattcagcttccattaagaaaactagacggggagcaaaatctaattgacaggttaaatgattacttcagtggggaaaaaattgaataccgttgtctcaccaataagaaaattaacactgcatcaaaagtaccagggttctctagtttcccacgtacacttatcataaacccgattagaattgagttaatcaactggcagccaagcaagacatcagagcaagttgtggtacctggtgtacgcgatgatgctttactagatatgtccccattcaaagctacaggaatttgcgaaggggaagaagtcgaagaagaagaggaatcagattccttccaattcaacgaattgttcctaggacaattagaacagatgggattctctcgcaatgctaccaaaagagcattatttgaaacgggaaactctgaccctaatgcagccacggaatggttgttccagcatatggaggaccctaacttaaacgaggcctttgatcctcatgcttcatcctcagcgaaaaatcgtgtcgattcagaagcactaaacagtatgactgctatggggcttgattcgaaactatgccgcaaagctttgatattgaagaatggtgacgtcaatgccagtgtagaatgggttttctcccatatggatgacgacggggagttacctgaagctgaggaatggaaggatcaatccagaaaaagttttggaatcccagcatcgtcaattgcctctgctaagtataaactgactgctgtcatatgccataaaggtaattcagttcacagtggccattacgttgcatttattaagaaagtggtcgaaggaaaagaacaatgggttctctacaacgatgaaaaaattctcttggccaacgatgaaccaaatttcgaggacatagaaaagaatggctacatgtttttcttcaaccttgaagaataagaggcatctcctctctaaataaaagagacatgcatcacaacatgaaactctaaaaaaataggacttgcccaccttcctatctgcattgggtattcaacgatatggttgtgtgtccatatatacatatatatcctcgtacatgactcaattcaatacagtatggtgggcttattcctatttatagcggttcctgtctggaggcagttgtgtccagccattgcaagtcacgtgaatatgcttcatgattccctgaaaatgaaacatgtcagatctgcccttaaaaataaagcaaactagatcaattatttaccagtgacagaacacttgttaccaagtaagtagtcacacaatcttccaaaaacgatcaacaaaccataagttattttaaaaccatgaattcaaacggatatatgtcttacgtaagtttttgcatacattggaggattgcctacatgacacatttttaatcaatactgtttctgtctgtccctgttttctatgaaacatggaacaaccaaattgagactataaatgtttctaactcataattaaccttttactaacaggtcaatgttatcgtgtagcaacctgaatataaccaacagagtttggataactctttcgccaatctgaattttggtagttctgacgagtccaaattgtatggcacaaccgccaatgtcatgaactccagcatggcacatggaggtagcttcagcttacatgggaacattgatggtatgggctcccactataaccaaggacttcagggccatttgagcggatcttctactcataggagcagcatgtcatcatattgggaacagccgctcatagaacaacataattcgcccgagatagagtcctcgagaggcatttcgtcaaacacgcatcctggaagctcttcaaataacacggtaataatggacagatcatcatatgctaaaagctcaggattcaataccactttcgactctgaaacagagccatcatcagacaacttcaaacttgaactacagttgaaagagacacagatagaatcgttagaaatagagataaaaaaattgaaggaggtattcaatcagggtttgactttcaagcagcaagaagagcagaaaatgaagaaatcaaaggctcttactttcgattctgaaatccagataccggcatccctggaaataatattttgtaagttatcagattcattaaagagaaaggaccaagaattacaagaaacaaaaagacgactagaaggaatagttacagcggttgcgcttaacccttcaaattctactacaaagtttggtagatatgacgaagaagctttagcacataaaatggtaactcgattggaaactttaatgaaggaaaacgaagaaatggcaaaaatgcttagttatggtcgagtgaaggagacaagtatcgagctcgaacttttacgtaaagaaaaccaagaactcaaagaaagactaaggattctacagcaagaaaagtaacaccaaagtataagatcttgatccttctttttctgatatttttgcttttttctgccaatgacattctagttggacgttttatttgacgatctaaaaactttcgagagtaattcaagatacatgtatgctatataacatctacctagattaggtatactttgctgacacacaaaaatgtaaatgaaccattgatatttatttcatccgacgttagaaacttacgattagagaaacttgaacatacaaagtgtagacctttatgtgaagtaattttagttgattaaataaactgtatgcggacttgtccttgtaatatgtacatgaggaggctcggaaaataaatattggttggccgtttattcttccagttacctgagtttggctatcttttcaagaagtgattgtgtgtttaagaagattatgaggtattacaaaaacgatgcgggaaaagtgattgttattcaagcctttgaaagagctcttctgtttttaacaccctttgccaataatcttagaacatcttcagttgtttcccaaccgatacaggcatcggtgatagaacatccgtaaatcaacttttcacggccaccttctggaggaacgtcttgtctaccttcgactaagttagattcgatcatgacaccacagatagcattttgaccagctgatagttgttcgtaaagtgactgagccacctttggttgatttctgaaatctttctttgaattcccatgagaacaatcaaccatgattcttctttggacaccttcagcatcagcaacctttgccttgaccaattcggcttgcgtcttttttacgttttcagcatcgaaattagttccagtcttaccacctcttaagataacaaaggtatcttcgttaccttctgttccaacgatggcagtgacaccaggtttagtaacagacaagaagtaatgtgagtgtgcagcagatctcatggcatcaacagcaacttggagaccaccgtcagtaccattcttaaaaccaattgggaaagaaagaccagaagctaattccctatgtagttgagattcagtggttctagcgccgatagcacccagagagaaacagtcactcaaaaattgtggagaaatggtgtccaacatttcaccagcgattggtaatttttcagtcaatctggtgaacatctctctagaaattcttaaacctttgttaatttggaaagaattatcgatatctggatcattgatcaaacctttccagccaacagtggttctaggtttctccaagtacgctctcataatgattaatagatcatcggataattcatcagaaattttcttcaaaaggtctgcgtattcgtaggcagcctttggatcatgaatagaacatggcccaataactacaactaaacggtcgtccttcccattcaaaatgtcacatactttctctctagcttcaacgatgatctttttggccttttcaccgatgggatattcatgttgtaataagtccggtggggtcaatggatcatatcccttgattctccagtcttctaaactacttctgtccccaatatgatcgttagtgatgaacattttttactaccctgtttttaccgcaatggtggtatcagtgaatgtcttcttgcctctattgctcttcctttggcaaatggaaaagagtggatggctcatcgaaaagtgttgtgatgatgttccatccaattttttttttcactttttgtgcaaagaaatcatgcctatatacatttctggaaaaatattatgagtaacaatttgaaaagaaaaaaaaaaatttccagtaacgacacagagttttgccgaaccagaaacaaggtacgaatatttatcatagtcgcagggtgaagtaccgttgcttatactttaggtgcaacaattgaaaaattttgaagtttcagtaaaaagtacaggttaaatttgtgcaatgtaatgtgtatttggttcaaagttggagttagttatactgaatacgtcggaaaaactgcatggcaacgggtactgccccaggaataataagttttgtgtcacgtggtatgcgagaattcaccatttatatcatttcaaggttttgtattggccatagtgtctgttatagaccggggtcatttcaaaagcacatttcctgccattgaccatttttatcattcacgaatcaaattcatatatatgtatggatataggtttgtatgcacagattagtttctagaacgtggctatttcttcccaacatatcgaacagtaataatcgaagttcattgcgggatgggcaaaagaagaatagtcaatggtatatcactcaattgcccatgttgttcattcatgtcaacagtttgcctttggatcgactaaggaccgttaaatacagaaatatattaaattgttcggtgatgatatagaatgatatagattacatataatacaggtcgctctaaatactgcttcaattatactattaacgatagattgaacagcagtgtactgtgcggtgatacatttattttcatttttgtttgtagttttgtgttattcagtttggatccatctttcaagagaatgttcaagcattgatctaaggcccgcttaatatagaacagcataactcgaacaagcaacaacacattaatgctttacaacacgtcccgcaacacccactgtcctgtcttggaggagcttgctgaacgtataccggctgctgaggctgttggtagtacattggctgttgttgttgctgatacactggttgttgatagtacattggctgtcgatgacggcccattgttggaattgtattgttttatgtgatttcctagatctgcttgcctctttggtttgctattgaatggattaggactccaaccgaacctcttctcgacactaagtcgtctcgtcaatactacttatatatatatatatatatatatataacatgtaggttacggctgtaataatgtttcaagttctaatcataggtattttcgatagcttttttcgaatgtttcttttctcctcattcgaaagttctttctaagccttgcgcgtctgtgcacaaatcctgcagaaagactgaacaagtgcacatcggcaacttagcagtaaaggctgaaagatgagttcagaagcgggattcatggtttattaaagttaggcttagttgtacaaacagtgtaagtatgaaatatgacaggaaaaaggaaaaaaaaccacttgttgggtcatattagggtcatattagggttaagatacattcggaccctctggtaataaaatgctgttaaaaataacttactgcgctatcagctgacaatcagctattttttttgaagtaaagtattttacggtaagtttgagggaagttataccccagaagataaatcaatgtcattgacatttgccatatctagttatattctgtccaaagttatacatcagatgaatcgaaagatccaaaaaaaaaacatccatgtgtagtacgcctaataatgattgaagttggctatagcttgatcaaacccttgttcccattcccacatatattctccatcacccttactttttatatactgtactcttctgaaatatttccaagcacaggttcttcctaagagtgaattgttaaatgtcgtgaacgattcgatgtccttgattgtattgcgaagagcgtcctcaaatctccagtgttccatcttgtcaccacctttgtcagcccagtagtttttgtggtcttcaacaagtttattgattgcaccattgtcgggtttcttccacgtcgtgggtctgtttggaatagcgcctttattgaccataggaatatatccccattctcctccatctccagattcaaattgaagagtccagaagaaccatccccaggatgcctgcctctggaatatacttgtctgtgcttgtccatatttcttcacaagatcatctctgtttccggaagtcttgtcccagctttgaccatcaatgacacaggaaaactcagctactgtgaaatctgccttagacctgtcaaattgcactgaggatgataaatcttgaatcaatttttcaacgttcttggccttgtccgaatcgctgaagcatcgatacacatgtgagtcgattataacgtcggtgaatagttttttttcctgaacccagtcagaccactgttgaggccaccagccatctgaaataaccaccggtaaggtactgttgatagaacgcactttttcgacagccttttcataataagatttttgtttcttaccgctttcatcaaattgagcttcattgacaatttgcaatccgattaaatttacatttgattgtagatcttgcaccacaaaaggtataacattatcaacgattgatttgacgaaactcgattcatcaaagaaagtagcagaaccacagctttgttcgccactatgggcatctccattagctccgcctggtaatccatgtaaatccaatagaactccaattttattctcatttgccaaagaaatcacctttttcactctgtcccatggtttcgacttggaataaacgtccttcaagctatagaacttctcgccatttttcaataattcaccatttttgacatgccaatatccaacaggcaacctaatcgcagtacacccaactgatcttaaccaattccaatctacacgattcaaatatgaatcataatgatcagataattttttggcagtgtcatttgagttgcttgctttgacctggtttgtgatagcatcaaattcattaccaccaccagcagaaaatagactatggaagatatattgctctagtacgaacattgatccgaaattaacaccataattagttctgttctgatagaaaattcgttcgtctttcaattcacctggttgaggtaagtccaagaacgttacttctcttgatttattcaaaaccttctgttttagcttatcgaacatgattggctctttaatatttgaatactaaattatgcttcaagacaagcatccgatatgtgatcccttcacaaaaacaaatatctcttgaaccgaagtatccgttacattcaatggtctttataggtttaacttaacttaacttcaacttcctctacttttccaacacgcctcatccaaaggtgtataaaattcatcagtagcaaaggtttggctcttttaaaagaaatatgtcataaaatgcaaggtactatccaaataaaagccctttttttaaagaaatgaaatatctgtaggtgtttctatgtaaaaaggattcgtaaaaaaggtctgtcagtttggaaaatacaatactcagcgaagcatttttggaatacgtgcatacccccacaggagattaggtagtgggacagagctatttaaattaatcgacaaatatctaataggagggaatttattttgaattgcagccctttaatttaacacgatgaaacctagattaatattgctgatcagacatggtgaaagtgaatctaataaagataagaaagtgaatgaacacactccaaaccatttgatcccgttaacgaagaatgggagatatcaggccagaatggccggtatagaaattttgaaactgttgaatgtcgacgacgattcgatcaccaaggatattgaggctgaagaggattacgttgaagatagaccacaactggagcaaaactatcaaagggtgaaatccactaaggatacggatctagtattttacacctctccataccgtagaaccagagaaacattgaaagggatcattgagatgattgatagatacaacgaattgaattgcggcataagagtatgcgagggggaaacgtatcaacctttgggaacaagaagattggcacactggcaatgccccgtgtttccaagtgcagtgttcgaaaataatgaaagcgtaacgaattttaaactaattaacaatactgagaccaatccgagtcttatacatgaggagaaacatttccttcactaccgtgtgaaggaagagcctcggattagggaacaagattttggtaatttccagaagactgcatcgatgaccgaggtgatgaatacaagagctaattacggtcattttttcttcaggttccctcaaggtgaatctgctgcagacgtttacgaccggtgttcagggtttcaggaatcgttatttcgccatttcgagaaaagtggagggaaaaaaagggacgtggtagctattgttacacatggtatattcttacgcgtgttcttaatgaaatggtttagatggacatacgaagagtttgaatcattaactaacgttccgaacggtagtgtcatcgtgatggaattggatgaaaaggatgacagatacgtattgcggacaacattgcccaaatggtgctgagggaacgaaaaagtaaacattatttgtagcattcatatccaaacgtaatgaattaataaaataaactgattttaaccactgaggtaatatttatctggataattgtgagtgcttgaattaccttctatctcacgtgatttgattctattggacaaaaagggaaagaccctcctgagagattaaaataattacccggatctaagagatttcacgttaaaatatacatctccttccgagtactcttagcttccactattttaacggggctattcatgcgttccgggtaatgaggtgttcccggagccaaaaatcatcttcctttatttcgcatcctataatgacgaaatgcaaaaacaccatgcgggcacgaagttgggcttcttctttttccggctcacagaataggacgctgccgattgtcaaagtcaatcagtgtgctgtctgacaacctgatagttggttccatggttttcagtaacatacgcatacctcctgctcactttgactataggaaacagaccatggtgatttccattcgataatgtttctaaacacttgaactttcatgtattctttcgaaccttcttcgtatttttgttttatgtatatatatatatatatatgtgtataaatttcatagaaaggtttaaagatcaattgatactcgtaaccacttctttatcagtcgaattattggtttattggttttgtttcaaggaaaaccaaggaacagcatcatcaattgattatcattcccctatttcaactaacacacacataactcacatacaatcatggctagaacattcttcattggtggtaacttcaagatgaacggaagcaaggcttccatcaaggaaatcgttgacagattgaatggagcttccatcccatctaacgtcgaagtggttatcgctccaccagctatctacttggaccacgctgttgcattaaacaagagaaaggaagttaaaatctctgctcaaaatgcatactccaaggcttccggtgcttacactggtgaaaactccgttgaacaaatcaaggatgtcggtgctgaatgggttatcttgggtcactctgaaagaagaacttacttcaacgaaactgatgaaatcgtcgccgaaaaaaccaaatttgctttggacagcggtgtcaaggttatcctatgtatcggtgaaactttggaagaaaagcaacaaaacatcactctacaagtcgtccaaagacaattgcaagccgtattggaaaaggttcaagactggactaacgtagtcgttgcctacgaaccagtctgggctattggtaccggtttggctgctactgctgaagatgctcaagatatccaccactccatcagagaattcttggctgaaaagctatccagagatgtcgctgactctgttagaatcttgtacggtggttctgctaacggtaagaacgctgttaccttcaaggacaaggctgatgtcgatggtttcttggtcggtggtgcttctttgaagccagaattcgttgacatcatcaactccagagtttaaattcactctgagaattctccccttcttatataatgaatacgatagttacctaggattttaaatttctatgtaccaataaacgataataacctctatcaagctggtaatagccgtgttgaattttttctaaacaagcactccgtagtatttggcttttgggtatattggcaataagtcggcccattgtactacaaactcatccgctagtggatacaatatcattccagtcaaactcaagcggttagtacgagccaaggactctacatatacgattttagacggttgccacaaaaatatatggtataatttgagccaaaatgtaataatgcagcatgtcccgggcccattgagtaaagttaaattgggatggcctcgcatggaggactttatacgatatgtgagtaccatagatctgattgcagttttaatgatagattttattgaacctgctagtgaactacccacatcacgtgctttatcaaagcggtgatatattacctttgctcgtaatgtatttgaaacagagatctgatgtatcttgttcttgaactttattatgctatcatcatccgaataaccaacatgaatcgtaactgcactttcaagaagcataccttgatagtgttcaattaatcttaacatctcaccggtatggcctccagaacccaagaaaataaatagaaccaaattcttcattctaccccctacattatccttgtctttggtcagaggacccgcttctctactactgtggaaaataggaatcaccaagcagattcgtacaagaagcaacgtcacactccatatcaacaaacaccatgcagtagtcagcagcattatacactaagtgatataattgtagggcttcaaaatgcaccgtaacaattcgacagcggtaacacccgacagacgcacaggaaaaacacctaagtaaagcaaagggatagaggttgatgtcagaataatacgcctagtagactttatcgggtcataactatttcgtttgagaaacggtcataaaccattttattttgaacctgcaagtaaattcattcatgaagtgctggtaaatgataatggatctagcattaatcaaggtcacgtgaaataaattccccgatatggtaattttatgttggtttcctctgcttttacagtcttaccatgcggaaaaaagtataatctcctaattgggaaatagctggtctccagagagatgtagacagaaaggtactgtatacgcaacaggttaaagcaacgttttagagacaatgatcgtacctgagagaaaactggttgtttcctcgagttacaagcatattaccacagcgcaaataaccagcccacattttttctttgtacatcgatatcactggctggttctttttcaggtgacaagacgcgaaagccaacttttaaactttttcactacgcgctcatagtgaatgtcagttggaacgttcagcatgaaatctctgatttacgtacatctatagaaaaaaaaatgcagcaggatcaagttttggtgagctccttcatatatatatcaacttatcattatcattcgaactgaccccaacgcacccttctcatcgtacattggttttgatctctttctggataaacagtgaaagttgtatcttttgactactattgaacggagtgttacaaatcatatactatcatcatgagcaaaccaagaagtcagttgaagcgcagcactgttatcctagacgacaatatggtacgcgaatacaaactcgctgttgagaaacttgcgccagtggatcagagaaataatactaataccagatcagaatctagtaagtccatcacctccatgatgacgatggactccgtattgtcacgtgataactccatcatggacttacttctggagcaacagacgttagaggatgagaatgagaatgatatggaagtggtttttctgacaaaggatgatacgaatgccgatttagactggaacatttgggaagcagaaagctatgttctcaccagaacctcactagagtttcaaacgaaatagattccgtttgaacgttctcaatgcatttttccagttttcctttcacactgatttgtgaaatatgagttaaaaaactcaaaatcacgcataagcaagactttactgtgtagaccacagcgattctttgtacattactgctactagccagactcggtcagtgtccctaaatattaactaataatcataataatcattataatggcaccattaccgtggataatacggcggtaaattctttgaattacataacagctagtgagagaatttaacgcatacggttttacctactgattgtaatgccttgttcaaaaaaattaccgaacagcccatcttatccgctgcgttaatattagccaaagaacgcaaccctgattattcatccatggtacaaacttgtattcttgcgatgaggcgtgtcttcacctgtagatagtgtttgtcttcggtaatagaaatttctggactcacgtagaattttctattacccggcccctggataatatgtcggaacactaatgtcagaataaggttgtaattgatgagctagtggatgaggaatatagcgacactaggttttaagggatacttttggaagttaatggagccaatttctcaggtgatatggggttatagggggtggaatcgtggcattaagaactttcttccactttctttggcagcttatagaagtttttgctaatgtcggtatattcttactggggtcctaatcggactacctgtgaagagtataaatggagagcatctagagtaattcaacaggtcaattgcaaactgttcttgctggtattttagtgctttctctccataaacactcacacaactaccaaagaacaattatttggttttcattatactaggtttttacaactactgcgctaaagctttaaaacaaatcattacaatacttcagattaaaaatgtcttttaactcaccatttttggaattcttcgacgctatcaaccaagaggttgaccaatttaacagattgttgaattcgagtggagttgttgctccaaagaaaattgaaggtaattatcctgctgattcgagacaggtcgcaaaacagtccaagaacaatagtaactcattatcaaactggttcaaagacccatggtttgctgacctaggtcaaaatttgattcctcctttggacatcttggatcatgaaaaggaatacgaagttcatgttagcgtcccaggcatcaaggaaaagaaagatattaacttagagtaccacaaggatgccaatgaaatcgtcatatcaggtgagatcccagacgtgacaactgaggagaccaaagattctgcaaagataagagaaagaagatatggtaaatttagcagagttgtcagattaccagattccccaggtatcgacgttgaaaacatcaaggcaaactacactaacggtgtcttagtcttgaatgttccaaaattgaaacctactgaagaggataaggctaaggtctataagattgaagttggcgatgaagctgctaaattgtaagttcgttccgatgagatttttgacttatgatgaatgataacaaatattatgataacagctttactgaaataaatacatctaatgattcaagaaatgcgaatatgttgaacgtatttcattttacttaatctatgtgttattccactgattaattcacatttataagttattgttgtgttctaagcagtggtggaagttatcgtatcggctttcttggtttttctttggttttaggtataaactcaattcaattcatatatacatataactactgttctaacaaccctttttatatgctttcacctaccctattttactcaagaatatggttactagagcggtatttctgctctgagagcccttgtctttcagaaatatttatttatatgatgctaatgaaatagattatgctattgattgatgtcgaatatcttttaatcgtatgctatcttagtgttgcaatatataaacatgctaagcatagtaaatgtatacagtacatatttactgagctccaattgatgatggcattagatgacttcgaagaaaacagtgaatgttaatcagttttcgttacctaatcaactttcacgcaagagtagatttttctgacaagaattaaactactcaaaaatccgattgcacctgtcactaaacaacatagaccactaattagtatggagtaacccaagtataaaacaatcgttgttaaacctcctaatctaaacttggtgaaaagtatagagtgacagaaaacataaaatgcacaaccgcatcctccgataacgaaacttctccattgccatttccaattttccatacatagcgagtgatatgtcaaaagaacggtgatcaatgatgttgttaaggcgagcaatatgaaggaaaagaataaaaatccaaacatgtaataaattttgttgaaccatagagaagagtagatgaaatataactcaacggcaattgaaccgaatgggaatattcctgcgagtaatgccactggaatagtctttaagtaccatggttggaatggaatttgtcttgctatttggttggtctttgttggatgttcattccaattacattttttccatgcaatgacggatccgatagccgataaaggaatcgagataacgaaccatagtagaactaatacaagcatggtctggaatggaatagcgcctgaggagtgtacaaagattaaaaaaaagttcaatccgaggaccacagtcaaaatagatcctggtaccaaaagtggggtgagcacgaggttcaacctccatgcttttccattgaagaacttgtaagtggccatagatgtaaaggaaccgaaagatccaaaaatggcatatagcaaaaacatgacggtagacaaagaaccgcgagaacttggggacaagaatccgagacacgcaaataagatggttgtcgttaacattagtgctagttgaccaccagagccaactagaacagatagaagtagtgctttgtttggggaacggaacacatcaccgtgaatcaacttccaaccagtttcttcttcgaaatcggtgtccaagtttagctcgttgtaacgagctaaatcattcttcaaagcactatacaatgagtgcaacataacagaagacaacaaaacaacaatagtagagaagtttatcaatgagaaccattgaatctttggatcgtagacgtgtaggtatttatcccatctagtagcccatactgtgtcactcttgatgaatttaactgagtatgtgaaataaacttcattatcctcggtttcgcttagtaccaaagatttacccgtactttcacaactatcagggctatcacgttttatagaagcaggattaacggtaacaccgacaatacggtagttgttctcacctctgtcatggtattcaatttgaatgtcgtagtgattaacaaaatatggaatttccgtaactttatcccctggagataacacgtttttcttcgcgtttagctgcaactctaattcatcatgcaaagacctagtgtcaggctcgtaatccgataatacatcaacaagacccaactcaaatccgttaccgtaaaagatcttgtttgttttggtgtcctccatttttcttgcagcaggtaaaccatcaatgatccagttctggaaaaatccattcaagatcaatttgttaatgaattttgcatctttgcctgggatcactgacttacacaacgattgacattccacatttttcaacaattgtaacttgaacggagaattatagattcgatcaccgaaaataatcgatcccaaggactctggctgctttttcaattctgctggttgacagaaatggaacttcttgtagtaatagtcataagagtacaaaaatccttctttatcaccagtgtcatgttgatctgtgtcgtaatgtttataaaattgagatggagtcaaatgattgaccaataacggtaaatcatcgccttcatggtatgtagttggtgccacgccaggtaaatagaacgcttcgactaaaagcgatcctatgagcgtagaaaccaacaagcttcgccacaagtaagtaaacattgtgcagaagaactgttatttataattgtctctcttttcacttctattaaacaaaaagagatatcccacgcagttgataagccaaaagtccagttaaacaaaaattgtgaaccacaatggaatgactagactccaggtaggaaacaacaacccagatcaactaatcaatggttcaagataatccttgcaacctttactcttttaaatgtcaaaaattaacattaacaaaagtagtattccaatttttcaatttaaaaatgaaaacaattttttcgagttctagaatgcgccaataaaatgaaagtcgaaaatacaaactcgcgcagaatatatacgcaatggcgaaacaattgggaatcgtcaagccgttgaagttgtgtctggggtcctataccaattgagtgaccaagagagcgttatttttcatgtgtaatttttcctctttattttaaactatttgaatacgtaaagaatgaagttaagttgatcacgtgtaacatgattacccggagatgtgcctggtgtcttccgttattcaagttaacgcattaatgatagaaccgccacatatttcaagataatgaccccagtatgcgtgtatcatacttgccccaacggaaacactttaggcaccttgacacgaaaactagtgtcaacttttgcggtaactctctgcttttgcttctgtgctgaatctcttaaagaaggtcaattgttaaccctgccatttaaaaaatcaaaaagaacttgaatatagtgtgtttatgttatagaattcgatgagataaacaattcctatgtggtgaaaattgagttatagctcttcttttagtgtttaaacgacattcgaaacaaaatttacgagtctgctagccatagcatcccatcatgtcgttacaattctcatatgagaaatatatgaacctgatacagtatccggaacactggtcaaatccgataccgcacgaaatatcaaagaaggtgatatacaatacactttcaccatgcatatgtgttcaaagcaatctagagctggataatcatttaaaagatatgtataacattgattcgatatcgatgctatttagatactttggtgactatatccaagacagagatcaaattccatcaactaccgatttgaaggaccctggatccgtttcaagtggacggcacagatcagattctttgtttcagagacaggcttcggagtgtgtacgattcaccagatcacttgaagatcttatatccattgattctgaggatcatattcttcaatcaacagacattgatagttttctatcacaatatttgcaaaatttagaaccaattatgaatgaaaatggcacacccagcaaacttttaaaacactcgatatatcacagattttttatcactttatcctcgataaacctttcgcgatatcatagtttccatcatcctgttgtagccttattgccattggatattaccaaaggtcaaggttatgaaaatgcaagagaaatactaatacactttaaaaacttgaataataccctagaaaatttcccggagttcatcaatattaacgacatactaccagtttttgtgttatgttatgatgaaaactcaagagagcaatgggaatcagtgcaggctttgaccaaaagtttaaagaaacaattatttgtcgaaagtgtttccatttccctattcacacctcacgataaccaaaaatcaaccaccttacattcaccaattacggtctccttacatgagcaggtttttaacatgtctcatccaacatccattaacataccttcgcggttactgacacatatttacgacacaatatcattcatagtggaggaaatgatgattcctttcatgcatcggaaattggtgttctgggatgaaaccgttttgcagcctagaaaatccatatttcagagcaataaattcttccgcaggtttatttctccgaaatcgaaccatccaatagcgcataaagttaatgaccctcaggatccagctgaaggtgatattatgttccctgcttcatctccagaatttctgttacggaagctcgcagattggtcattcatgctatctgacttcaaaaaagcatattccatctatgatttgctcacaaaagactttgaatcgtatccccaatatttggcaccttgcctcgaatataaaacaatttcgttattaatgggtgctcaaaatataattacggcaaagactatcaagaccgaagtggaccctttgatgaccagagccatagaacaatacaaaaaacaggacgaaaagcactcgcttcgggtaattcattgcatcctaacgttttcagatttgttattatcattaagtgatacctgggtttcctccccgctagctgttaattatttgacgtatattcaaaaatcacatctcttaggtccatatgcaaccgtaataatattggaacggatagcctatgcttatgaaatttgcatcgatttaagagttaatgatcatttccttcctaaaccagatgaagaaaacaaagcggatgaatctgaagctgctgagaattctaaaaagggagaaaatggacttgaagtggatgatatgcatgaatggagaaatgagaacaagctgatccaaaacaacctaaggtcagaggggctaactcggtttagaaagtactctttgtatcaattggttgctgctaaaaaatgggtagaactacataaaaggaatcaagctaagtggtgcatttatcatgctgctcctgcatacgaaaaactaagtctttctaaaaggcccgatggccttttccatagactgtctatggagttgtcataattacacgctagagattattatctataagtccttgtattaatactaaataaattgtttatgatcagatacgtcatgaattaaatgaatttcattagcttctcaggaggaacggtatctaacatctcgtcttggttgattcttggtttgagggattcatagccgttattattgataaagaagtagcaaattagcgcaccaattaggccaattacagcaacggtagctaatgctaaagccaaacctatcaacacgatgaatcctctgtctatttttttatcttttgtggaatgcgatgagctggttgtagatggtgttggggtggatgaagcagatgtgtcagaattgttgctctgtagcacggtttgtgaagaagaaagatatagatcgttaacattttggaaaaatgaactacttggtaggctctcctgctcttttgggtcagaaattacgaaatatggttgccatttttgtgttgaaccatcataaactacagaggtcagattgccccattctgatgagttcaaagttccttccaagaggacgatatgagacccttcatctctctttttagattcagtaccagatagcactttaaaaccagaaacaatagagtcattgttcaattggggcccaaatgaactccaggtcccactttctaatcggagtatttcactattcatttgagcaatgatattgtcggtagaatcatcgataggaacaaatgacagtagaggttccgtaccagattttaccgtcgaaaatatgttgctacccacttccacagaaagaagttgtatattagactcgttgttagtcttaattaaaccaccaactagaagggttttcccttcgtccgcaaactgcatttgtcttatatcgccagtgattgaatcatttaagaagctagtccattctttagtttggtagttatatagacacaagtcattgcaattgtctatctcgtatgatccaccgactagaatactattattagaactaaaagaaaccatagaatttacacgttcattggttgaaaagttaactcgagcaacgttttcgtaaccggtcaagttcagtatgctaaattgaacatcatattggcttgaagaattgcttccattggtaccaatagccaaaatattcggtacattatcatataaaaaggcgttaattggagcagaccattgaatctgtagcatatgcgaggaggaatttgtgttggtaattaataccctatgttgaacattgtcagttgagccttcttgtaaggcataagcagctgaagtatcattaatatacgccgccttgtaaggttgaacatctgttggtagctcaggtaaagtaggtgatgatacttgtccatcagatgacagggatgccagtccattgagttcaccgacagaccttttcaaaaaggagccaaataataaagagtcgttaccagaattaatcccagccgactgtccagttatttcaaacgtggaggagttggaaacatacatatttgcagacacgttgaaaatataggcgttgtcgaagagcaaaagctcatgcccatcaatggtaaagttcacgatcctgtcgatgggctcatctaattggccaaagctattgaaggcattaccatcatagctcaaaatttcatgccgactgtcattctctacttggtaggtacccgataataataaaccatttgagtactcaaagataccagtagtatatccagacgttcctagtttttgagaggaagaaatcaatgcttcatcgttgagttccactttagcaatcccattgaaattgcctccgatcaaaatatcgttattcaaggaggcagcataaagattggcatcgagcgggaaattataaagagcataatcattaaatgtatcattcgtgctgaaaattgatgctgtcacatttgcagtgttgtattggaacaaaccgttgagatgaaaggttgtatcattgctgctgatacttatggtgtcaatatactcagtaataacacccaagcggtcaaccaccatgactgaatcgctttcaccaatcgctttatcccaggttacaattatttccggtgcgcttcctaatgaacctgtatacagagggtcgaatttatcctcattgttggtctgataaatcaatacactggccagcacttcatttatagaacgatcaatcatagtgacatttacgatacctcttttagagcaagaattgtcttgtagacagcctggtgtgtagatattgaaagtgtatcttcctggataagtaatgttggggtggaaggtgacataagggatattatcgtcgatgttagttgatatataggtatcagattcgtcagtggtgtaccagttatcagaggatagctctgcctttgaatattccgtaactgattcgcagtttggttcattataactattattggcgtacaccataaattccgtttcgaatatctcaatagaatgcaacgcggcattacttccataggacgctagagctacaaactgtaacatggtaacaggtatgtcattaacaaaagcaaactcctgataggattctgaccatttcaaattggtactattgttattgatgcccactgactttggagctgcagtggagttttggcttatctgtgtcaaatcttctatcgatagtaatggacaccatgcatcgcactgtttcagctctcctgatgcaggatccaaatacgtcaaattcatgataccattggaaggaccggtaataattctgaacagggaaatttcagaattttcttccacagaattatatattcttaccttggatgggtggatctcatttttcaaatcgaattgcaaagtggattgaacggcttcagatgcagaccaaccattttgcccaccagagggacacagaagaatatctgattgaacattttctccggtgatagatgaaagtttcaaaggtactgattgatcgaattgtagggacgtcaaatcttcatgagatgaattggtcgcattgccaaactcttgtaaaagcgatgcgttttgaatctcttggaaactaccagcgaacaatatattatcggagtttaatttcacgactgaattaacgattgaattttcaccaaatcctttgaaaggaaataattcagtggtgtttgcgacaacatcccataatacagccccatgtcctgtctcgttggagactgacatagaaaagttaccaacaaatatgacagtttcattgacggtcagaatgtccattacattctcgactgcactagggaatattggtgatgtggtcaagctggttaaatttaataatatttgctgttccaaagcaactccattaatttgacctgttcccgacaaaatgaatgaatcctcaaacaaaggaacaatcatggttacagtggtctctggcgatgtttcaaacaatttaacaaatgtatcattgctatagtataataatgacgactcattggcttgaacagtgaaattttgttggcctgtataggatatcactgtcagttcctcaaaattattcatgtacgtcaaatcaggggaatcccaattgggtgcctcataacgtgagatattcaacaacttttcaatgtttgacagctgactgcctcttaccattccagccaggacgagcaacacatatatcaggggatttattgagaacattgtttggatcagtgaagactttgatgtatttcaaaaatagaaggaatgacggaagttggttttaatgagagattagatcaagttgtgcaaaatcaaacagcaaagaacaatgttaatggtaagacagaatgaatgacgttattaggagagtcaagtaccaaaaaactaaatcaatgaagagaatcctccaaggaacacttaactgatatcttacaggcaggaattaaagcaatatgataaaaacaattgatacactatttgttaccatgcactaaccagatttaagggaagaggaaaagctgcacgaataaaggccttttttgattgcttctctcgtatctgttaaatgagatcaattaaagcctaattggaaaattcgaaatcagtatattagaccaaatatttgttgtgactcttttaaacagtgaacagtaattgaccagcacactaacttgttcgactaaccagtagagttatcaaaaaaggattaagatcaatcgaaaatcaaggacgctacaggtctgcttctaaagatatcaaaatgatggagtgctaagattttacatataattattacttttcaactaaacctaccaaaaattaaaaaaaaacaaaatggtaatgaatcaatacaaattggcattgtctttttcatggaccaaaaggttaattcttttgaataactactcccgcacgaaaaaaaattcatatagatgagaactagccaaaaacaaataaggtattatttcttcaatggtacaacttcacaactttgattgtgtgtttgtctcagaaaattatttgtaaatgacattgtttacttagcctaatcctgggtctcgtcctaaattccccatttgtttgcctttttcgttgttgaaacgaaaggcttctattcaaataaaaactgaaatcactttccacggatgtaaacaagataagaaagaaacgactccactgtcaaaaacaacattatttcctcattaggcaaaagcaaatcaacaagggtaggtcatgtgggatgcttgtagggtaatgctttgggtgcaagaccctccagcacctcgggaattcatagaagtagcttttacgtacgcattttccttttcagcttgtcagtaagaagttatataaagagtaatagctttggtaaacctttcaactcataaatgcaagtaggttcacacaggacaagccatagtcatgtacataaattgagttaatctgggaattaaaatcatcatctcgattctcaatttttggattacctctctttagagctaattaatcccctttttactgtttgtggagacaaaaagtagatttgttaagtaggaatttcatgtgcgctcgcttcttctgatcctaaattgagttgtaactctatttaggcttttattacatcatatatagtgcatattttggtttgttttttccggccgttgcgctggtcgacgtcagaaaaatacgaaggaaccttaggctgtggccgttccagcatacaggagaatggcatatacggagcatcctactgtctactatttgctgcacattttgcgtactgggcattttaaggttacagaaaggtcgttcggtgctggctaatggatattagaacattaacgtgatcatcaagcctttttagattatagtgccgtcaacgattttgtctgttgcatttcacgctcttagtatttcatataagacaagctaacacagcgccttttaaattgacttatttgttttgcgagatgtgtcgaccaatgcgatttgccgtgataatcgacgcagcaatcggataaactccaaactatatccaaaataccatttaaatggttactattgcgttattccaaaaaaaataactgtgcctttctacccacatcaagctgcaggtacatttggtaatgtctacatatgaatcacttaccaattcattgaaaattattcgcatactacagaaatttggatagaaagcatgactttcttattaggcttttattttcgctgttggatgggcccacctaacggggaggtgaattgagtgaaggtcgaaaaaattgtctcgatgttcgaactttagttaagagcttcctattcggaatactgtgctcttcttatttctctgaataatcccagttggttttaccatcctgcaggcattgtatgtttaatattccatcatggaatgtagagtgtttgctgcttatcattacgtcatcgtcaatgcacatttgtgattaatactgtatgtagtcttcaacggagctgttgaggttctgtgataatggggacccattcgtactttgtattgccctacaacatgaagatgggatatacctcaaagacatcagtcaattcattctcttgggggggtgttgtctcaggcagaacgagagtacactattcaggatccaacagttgatacttatctcgcacaatctttggccgctgaattcaagagagaaattgaatgttctttgatagtattttcaaaatgatagtgggaatgttacacataaagaagagagcgttcgttagattgaagtgaaaaatttctcaaggtatttcatttcatttacagtatgtgtttctacacaaataaaatgaatgccatggtatttgattcgcatcacagttactcagaagcgatctggtaatgcagtttacttgaaattagtaaacccttgtatatttttttttcccactccatactcttgctttgctactagttacgcaaatgaaaccgcttcaagagaacatgtaaaggtggaaacttgatgcattacttgttatcgtactctatcgtttgctgtctgtacgacctttccctttcatttgaaaaatcagcccctaattacgctttcaatttcaagccgttatgggagggaatcttgaagaactcgtaagatgacaccgagaagcgtgagaaaaatgatagagatatagatgaaaaagcatctgtttcctgtcaacatctttcgcatctcgacctcaaacattaaaaacaaaagttagttgttactattaatattagattagtgatacaaatttgttaatgcgaggtttcgaacttccatgttcattcgatttaattgcagagcttaagaatggcaatccctactttcctactggtttgtttgttgacggttaattgtttggttagcaggtttcggttaaattccaattacattttggattgaagatttagatgtctagctaaatcatcatcatttgatcggcttttctctaaccaacaattctctctttcaacttttgaattacgtagaaataggtaatatttttccgttagaactagattaaaatttcaagcaatttaactgttctttgttaaaaagtatgttatattttggacataactccatggggaattactcaattgaatagagaatgcgcttcaaacaaacacgatcaagctgtttatgtgttgttctttcatttatcacagaaagtcaaaatggttctgcatcctatttgtttgaataatttcaacaggagtaaacaaagaagaaggaagtgaagcaacatcagattaacagtggttaacagtaaacattgaaatgacaaataatgatacaaggaagtattagcaggcgttcagatagttggtatgataatgagcacccaataaacgctgcaatcaatggttaaggaaaacatttcataaggcactgtttggatatactttaagaaaagtgttgaaatctctacctcatcaaacagtcttccgacacttacaaaactaccatgaagagagacagaccactagtagaatcttatagaactgttgttggaaagtcaagcgttcttcatatcatagctggccggaaactaactgcgttccttgaatgaacatcatttttaagttaaaagttaaatgtagcgctctaatgaaagaacagaaacataattaacgaggtagagagaattttttgaggtcaattaaagttcatttttttaacggcattcttgcttttgattgcatttctatttttgttgtttattccttattaaaggttaaccaataaactatgaaccagtatcaagttgcaattgttgcagttatggagtattattatcattattacaattgcaagtattaagcggttgtattgaaccgacatgtagttatcttgccagatctggtcgttgtttgagcaggtccatcttcagctgattcaaattattacacacccaaataacagaatgatcattttgagctcttatgccatctatgatatccaaaatttcctcagaagtaaaactggtagaattcacaattgtttcaacgaatgagcaaaaagctttgcgtttttggaaagtccttttcttttggaactttgccaatttcgatctcccatggtcttgaacaaacgagtcaatttgaggtttcaatgattgcatgaattcgttatatatcgaatacactgagtccaggtcgttcttcattacgatactcaagctaccatcatcagtcacgagataattcttgccatcttcacttaaaggtggtttgaactgttgaccctttgacaccgaagcaacaccaatttttttagcatgcattgttttagcttgtttgtttatgttaagttgctgagggtgatcagtatccgtattcatacgacgagggagattctcagtattctcttcatacgctatgttaaatgcaatatccagtccagatgaatttttgctgtaagcactagtggtggcatggtcgaatttagaagaattcgtagcgttagatggaaccgactgtgagagttggctttttggataagtaacatgattgaatgtaaagggataagtgatcatattatccatcaattgctccatggaggtggatagaccagaagatggtatattttttgccgaattaagaggagagatagaagtagaaatggcctgatcttgagtatttgagtttgagaggtattctttcgttggtttggcatctagctttgtatcgctttttttcaacaggtgtgggttttcaaagagatactgcaagttttgttttaggtaattaacgtattcccttaactgctggttctctgcaattagattttgtacattataatgaagagataaattttctgatgccatgaaatactgagatggaggaatatagtgaacacttgtgttaccttgaaaatgttcttggtttaataaattatcttgttgagtgtgtcgctgacgttgttgaattcttaacgtatcacttgagtcgataggtgatgtaggatccgcctttgacgattggaactttgtgacttcgagttcttttttaataggctggggcaattgactaaactgttctgttctcattgaaaatatacgttctctgatagcgttgacatcgatcgcatctcactgaaaaaaagaaactgaatcatttccgacaatatctatagattgaaatacctgctgttgcacttcagataatgctctaatggcttcaatcagtaacgtgattgttgacgagccgtgatgacagattctgatatcatcttgaatgaatctgaaacatttatcattggttactaaagcattagcaaacagtgggtcctgagatcgaacactgcaccacttaaagtatcgaagtacgcatggaagagcagttgtttttagaattgacaatggaaacatattagctattggaagcattttggccaatcttataggtatattgctgaccgtttcgtacatgctaatgcaatttcctactatccctgtaaagtcatcaatgctcctgcccttttccaaggagaggaacatgtcgttgagcatgaagtacatgttcatggagataccatctacttctgctgtatttagagtaatcctcttcggtatccttgtaaggttccctgatgacaattcttcggtagcgctggggccaaggttgtcactttccttggtactgtcacttgtggtatcgtcatcattattcaattgtgagtcggtgctatcgtcacttgatagatgttctggtccttcttgaccaggtatgatggtatgactagcagttgaagagctaaggtcactatttgtagacctatttgcattcataaaattaattccgttatatgaagttaagtgagtttccctgcacaaaacaacttaattcgtattaaattgataattttgcctgggtttgattcaaaaagaagttaacaatgacgacaaaaataaagcagagataaattgcaaagaattgggaaatattggaatattggattacacggtgtcaggtattttcccttactatccgatgttcacagttatcaactgaatcaaaaaaaacccaagatctgaaattcttcctaagcgactcaagattatattgcaccacacctttctaagaaaacctgtatcgaaaagtgactggcgaataacgtgagatataaatgaaggaaagcaggacaaacttgtgctgtaatacaattcaattaatttgatacgatgaggatttcagtgtttgaagaattgtaaaagtattaagttttttttctggtataatttatttctcaatagacttaaacgttggttcagttactttgattcttccccttttccttattcgtaaatcaatgagaactgtattggtacaaatcaattcaagaaagcaatccctcttctcagatgctggtttggaatattagtaccgattgatgcagtgtatgtttttttccttacgttctagaggtgaccacttcttctttgctgtcttacctcttttatcatctaactgaagatgctttcaaaatatggacaacagacaaagataaaaagtacttgttgatattagacttatcaaaaaaatatgtcaaaggaaaaaattaataaaaatgttcaatggaagatgatctgctcagcaaagaaacaaatacctatgaagatcacaagttagtggtaatatgttcctttcagtttcttcaaaaaaaaaaaactgcaaccggctaatttgagtagcacaaaatctttgcaattgtcttctgaattttaattctcaccttttgatcagacttttattttttttttgcaggtgaacgttcccctttgtctgaatgtacctggaattaacagaatctgaattgaatcttagttcaaatctattcaaaaagcctatcggggttcacttaatgtctgcaacgtagacacttggatgtgggaaggtgataatatatttataagctggagacgggaagaaattcaaatgaaaagttgcagtagctggtttgcgttttttcttttaccctctttccttcctcaacagtaacattaggatgcatgagcgaaacacacaagtataaacaagaataataatacgctcatgcaactgtactgatgcgcctcatccaaagatgccgatatttatgtttttttttcgctttgttgcctgcgagcatgaatggttttgaaagatacgaagacaaaccttaagcaatttgagaattgtttttttcggaatacatcaaagatcccagccatgaaaggcttacttgcttcgatgtacctgtggcattttatggatcgctagcgagcataagttaagttactaagaagctttcaaaaatgaggaaagaagggaatacgctgaggggagtgcatcggaagcagcaaaatatgctataaacggcatactgcgcgcctcggtcgtacgcatacaaccatgatggtagcctcttctttccatactccagtacagatatgcacttactattgtattataaattacggataccacaaacaaaggctttttacttcctcagatgtaagagcagaatcaaaatgactggtaaaaactgaaaatatgaaaagataaaatcatagtatacctcgtggtaattatagtagtcgaatcattggcaacaacatccaaaggcgcaacgtaaggaacaattcaagaaaagaaattctacacagatctataaaggtcgagcagaataaacagcgaaacaaaatagtagtgcacaagatacaaacgacagaaacattctttccacatgacagatcaaaagaaacgctagttttatttgcacagtatctatactgtgagaaaaaaaaaagattgcaaagtggatgatatcaataaaaccgttcttaattgcttcgacgcaactaagaaaagaaaacctatgaaaaacgagtacacaaaaacagaaaaaaaaacctagaaaaaaagtatgcactaaagaccgatctcttctcgattagttctatgtttgagttacttctagctgttttccagctgcaaaatgtatatatgatgatagtcgcttgtatcggaatacatgttcataatgccctttattattcttttctcttgtacacgacatgacatagtctatcccaaaggaatacgtagcaatatcccggtatgttttcgtatctggtcatatatatttttcatgagctgaacaattccgatctaaagattcgaaattacagaaagtgacctttaaggccatacgatccgaataggtatatcttcgggatacaagggaattagacacgactggcactaaaagactacttctcttcacttgtgctctatcttgtttataaccgacttcattaagactaaaattagcggttgcggctgatttagtctccggcgtcagtttctagttagatttcagttcctatttttcgatcaattgtgtattttttttgcttgccccatgttaaaaattgcatcgactcttacttccagatctttcatttctggcgatgaacccttcaggctacgtaaggatctgtgtttcataagcaagtgagggtttgccggcacggaacgtacaaacacagaacgtttaccaaattggtaggataatgctttctccgttaacacctttcttctgccggctaaatgcccagtggccaacaatgtaccgggtgaactgcacctgacaaacacgaagaaagatttttcagttccctgtttgtcctctgttcagcccctgtgaaccgattttaaacccgaacaaattattgatccagtttcagtgttcattccctatacaaagtgcggctgaatcgctcgttaaaaaaagagaatcagctttacttgcttcacatcaacctacgttagctcaaaatgcactacaagacgcaacaggattgttcattgtctgaaaaatttctcatggggaccgcatgcgtgttgtcgtgccatttgtagaatctagtttaaagttccgacaaaacaatgcggtgctagttaaaagactttcaacgggatagtaatgaggagctaactttagcagaatggcctatagggaaagacggtaattcaacttcagctcgttcagaattgctcactattcactgtagtgttttccgttgttatttcaatcttggaagcgatcactcagacgaatcggtattacttattttcatgttccttcggagaaaatttctttttcattacttatcgcattctttactgtattcgaacaaattattccgaccggcgctggtaaccagcgagctgaatcggtatgtgaacttgaattgcataaaatgctgattttgcggacattaagctgagaagagaatggagcgttctcttttacagtctgatatgccaaaattttacaagaaatatcgaataagaagccatttcatcagattaccgtttttgtcaaaaaaaaaaaaatacaaagtatgattggtgcgccagtattgattattgttttgcacaatggggttcttttcgttgaaaatattgtttgcgtatctcgagtgttgcctgagttacgcgttttatgtaccttattcttgcatatttataaggcattatttgcgttttcaagttcgaaacttgcaaattatgttttgagagtttccaaatgggtactgaaaacaaagatcttcacgtgttactgcaaaggcagaaggcaaagtaaatgaatcgatcttaatggaaaagcacacattaaccattcttttggggttttcttaccggagttacttttagaacatacgctgtacaaaaatggctaatctggatggacttacactagttttggtattagttctgcatggatcaggacgaagaaaagaaacgaatgtgatgtttgagttctaattccattgcaattgcatgttcggtctgtttgcgcgtggaaaagaaaaaacttcattcgacaattgaatccggtaaatgatacaaatgtaaatgacaaagtttgacttaccattcacaaggggagaattggtctcagggttaaatttttaaactacgcatttcatgcagtaaaaaaaaacgtaatagctgtaccttctttccaaaaaaaaaatacgctgataaaatgtacataattcgatacagacagcaattatttaaatcgttgttcaccccttctctatcatttaacttcatcgacgagttttctgtacttctgttgagtagccgccatgtccaagaaaatcttgtacttggcgtttaacaaaagtctatctggagcatcctcttcagttggccacacaaccttaccacctcccgtcatattgtacataacttcccataacttgtccttggttacatcacgaaggactttggcattgttgtgatttgccgcagaagtagcagcctccttagacttttcagttttagcgtcaaatgtcaacagcgattcgtcttcattttcctcttccatttcatcgatgattgcctcctcattactggccatcacagggaatggataacccccagtggtagaaatttgtgcagtggatgatgttgcagaaggagcagtgtaaggacttggcatgtcagcaaatttcaagtcgtttgtcttcttctgtgcctttgcgaaactagttaatggtttgagggtattgccaccaccgtgtcctaaccctgatgcagctgacccagaacgtgatctggatccatctcctataataccagcatcctttctgctcaaagaactcttacgacgaatggagacgtccttatttgaagttgttgcagggtcggatgctgtctcttcaagtttagcacatgcattaaaggactcgcttgccactgcccctagtaaggcagaaccaaatacgacagcggcgtcgatgtaccttggaatcacaattggtaaaccggtacagtctgccaacaatctcattaataacccatttctgcattgtcctcctgacatgaagatggcagctaattcatgtcctgaattacacatttgctcgacaatttgtctcgtttgttgtgcaatgaattcacaagctcccaaatacattatggatagatcatcgatagagttgtccatagattgaccaatgatagcggcacgcatagatggatcagcgattggagatctattcccatgataatcaccgtaaaagaatagatgcttggccaatgcaacaacggagctagctttgcgctgttgagccaatagctctaatcttgaatttaaataatcgaacttagagacgtttgctgcatctgaaagttgagaaagctcggcgtatgctggatgggtagttaaaacgtgggctaataatgcacctgtgcatgattgaccaccctcagctaaccaaaacccaggagccataacatctctgtaaggtccccaaacacctttaacaaatattgggtcctttgacatggcaatatgacatgtcgaagtaccagctacggcagccaaacggcctgtggcacggtcaattccatgcttcacttcatcggatttgaccaaagctgggatttcaacgtcggtacgggcggccactgttccgacccacccggcatatgcatcgataacacctgaaccgacgacacaatgagtactcaaacctaattcagcagcagattcctccgtcaatgtaccgatacattcaccagcggacaggaaagtggtttctgttactgaaccaccaagcttggcaaaatcatctgcaatcaactcttccaatcctatttcttgtaagaactctttagaccaaccgttcttagatccttctactccaagtggcaatagaccttgcttacaaacggtagaacagtaggatctgatctctgacccggtagctttgaaagttaagtagtcagccaaatcgaagaatttgcactgagcaaacttcttctccggaatgttgtttttcaaccatttgatctttggaatttccatttcaacactcatttggccacctacgtacttcaaacatttatcaccagtggcattaatctcctcggtctcttcgatagctctgtgatccatccacaagattatattttgtaagttgtcagtaaaatcaggaccaacaccgacgtcctcgttgttattatcaacaacgactaacgaacaagtcgcgtcgaacccaatcccatgaatagttctaggatcgacgccagagtctctgacaacgttcttaacacagtaacagatcgcattccagatctcttgagacgattgagtgatatagtttggtttcaactcgtgcctttgaattggcctctcagctagcgaaagaatattccccaaattatcgatcacacaggcacgcgctgatcctgtaccaacgtcaacacctacatagtaaaccattttacgctcattttgaagcgataacccactcatagagtgggaaagcaatctctgttgcgagatagacaacgaagaatgtgactttctcgaaccaaacatgtcgttcccttgttaaccccgctttatttcttgagttggttttctcaattaacaatcagttctctattctggatgttaaacgttcagtgacaagttgaattgaaatgaacactaaaccatttagccctgtgcttttatataaccgattgcgatttctaactataagtaaaagaatagattgtctctgtgtaacatttaccttaatatatcaaaaaatacgtaataagctttcctttcacagctctttctaaacaagctttatcttttttctttttcttggctttcttccttatttctttccgaagccaaatagagcaatcatgggaattcagaggattacggaagttcggaacaattgtgcaaagcgcgttgcatgtgagagagtactaaagaacactcgagaagcgacctgtaatgagcgcattgcagatactctaccctcctgagctttgctccatcaagttgtcttgtttttgtgtatatgagtatgtgtggtttctccgtatgtgaaatataggggtacttcatagaggcaggaggggatcatagtttttttacccggatttgaatttccgctactaaaaaataataccgtagcagtagcagtttcatttgatatcacgtgagcgtttgtgaaattgaacctatgcatatatactctatatacacgaaagccgtggttgcgatcacatggttacaaccactgttggtagccaaatctgttcttggtgcaccaatcgagcccgtgttctagatattcttctcttgtgacccttgctgagcggaactgatccgagttggcaaagtctttcatgctttcccatccgtgtagagatttgtccttttcctggggtgaatgtactttgcagctccagtctatcggacattgtctttgtaattctgtttgtaatcgctcgtggaagtttggaatgttaaaattgcctccggtgcatactatattggcaacaagtaatggtctgacgacttcgggacacatgttgatgcattctagaattgtttcgacgattcctggttttaaaatctgtgcaatttcaggatgaaagaacgtttctggtaccgagaagacttcatctgtgagtaataaggtctgtgcatcatccgtgagcttttctttacctggtttcttaacgtaccccaagaaactcgtttggaagtccggtagtacatactcgacctttgtgttcattttgttgtggaaacttgaaaaatatgattcagggggaacaaaagtacattgctccttgatgttatttacaagtattgtctcttccatcacattgtaatgcctaaacgaaatggtttcctgtaataggcctgttaaaaatctgccaccgatgtcgagtttcttgatagctttgtaatacggtactccctttattataggaacagcccatgtgcagttaaaccccgagtctataactaattggaagtccttgtatgaactagttttcttgtcttcagcagcggtcattgcgtcatcttgatattgaccctggtaaaaaggaatatattgtgctacaggtcctttgaacatagatttgaaatcatattcttcgaatattacctggtccatgtttttcgaaagctctggtatcgtcatgagcgtctcacttactactaaatgatgatctttagtgtcattgtcgtgtgtcaagttccaatggaagtcgtcctcgttgtaaaaacagtaatcccatacttcactttctaattcccatgatacaagttgacccaattcgtgaggccttcttattaaagcctgcgatatatcccgcattttcttcgtttgatttgaaaggtggaagcgagagtatttgtccttggttaagcagtttaacgctcgcagtggctgatcccatccactctcaccaaatttgatttcatacgatccgttatcgatcaccaatacaggctcactcattttaatagatgtatgattatattattcccattaaattatcccatatagccaatttggcaaatcatcaggacattcaaagaagcgcgcatgcagattgcctgtgtttttctgtagtagtgctacaatttttcttcatttcctttttgttatttttcaaatttcatgttttgaaaagattgtttgtttaccaaacaatcatgatgtaaaccaaagaacttttaatattctatcatgatggcgatggcgatggcaaaccaccacagccaacgagcacctcgacctgtaaagctattattctggttgcctcctgtagctgcactatagcttgattgatatgactgcagacagttctgtgccgcatctgggagactcaccagaaataaagaggcaaagagtatcacaatcgccaacaaggacgccaaggaagttggttttgggctcacctgaaaaaaaatatgccgtctctaattcacaggctactactgccgcttctaatacaatggatccaccgagtctgcaacctcctacggcacatgctgtacgagggcgcgaatacagtcagtctccgcctaggtctcctacgcgatcacctactagatctccgacaagaaagcttgaattgatcagactttcacccaaaaaaagtacacgacttgaattacaaaagatgcacgaggccaatactcagacctcacagcgattatgcattgataaattggttttgaataatttcaagtcgtatgctggtattcaagagattggaccattccacacatcattttctgcagttgttggtcctaatggatcaggaaaatctaatgttatcgattcaatgctttttgtcttcggttttagagccaataaaatgaggcaagggaaactctccgagttaattcacaaatctgagcagttcccgagtctggcatcctgttctgtccaaattcattttcattacgttcatgatacagataatggtgaaaccaagattcttccatcggctggtacaatggtggttgaaagaagagcattcaaaaacaactcttcaaagtactatgttaacgggaaagagagtaattatactgaagtaacaagacttttaaaagaggaaggaattgatttggaccataaaagattcttgattcttcaaggtgaagtggaatcgattgcccagatgaaggccaaggctgaaaaggacaacgatgatggacttttggaatatttggaagatataattggcacagctaaattcaaaccgcaaatcgagaagtgtctagaagagatagaaactttgaatgaggtttgcatggagaaagaaaataggttcgaattggtagataaagagaagcagaatcttgaatctggcaaagaagaagcactggaatttcttgacaaagagagaaaacatactatattaaaggctcaactacttcagcgccaaatttatgacagtaaccgtaaattggcaacgagctgtgataaaatatctgcgttgaacatggaatttcaagaggaaaagagtcaatatgaacatttacaaaaggaagctgaaaccctgacacatgaaataaacaataccaagaaagaaagcaccgcattagaaactgaatctaaaaacgtgaattcaaaaaaacgttctttagaaaaggattttattgccacagatgaaaaacttaaaagtattgcaagaaaattaaaggctgcggagaaggcattctcccaatcggaatccaacggtaaagcagcagtcaatgaaattgagtcgttaaaaaagaatcatgatgattgtgaaatagaacttcacaatctcaatcactctatcagtattgagaaggaaaaacttaatgaaatcaaaattcatttgcatgaaaaaaccaaagatctatcgcaggagatggaatccttggaaagacagttagaaccttttagggatcagatacaggaaaaacaatctgaaattaaactttcagaaacaaagatcacaatgttgaaatccagtcacagtaatttgctgaaagaaaaagctaccattgaaagtaagatagaagatctgcaacttgaagagctgaaacagaaagagacagaaacttctttacgaaacgaaaaatccaaggtcgaggccaggatatccactgctcaaaaggagtgtgaagaagcccaaaaacaaacgaatgaaatgcgagatgttttgattcaacaacgacagattgttgaagaagccaaagctaacctcaatgggttccaaaacaaaaatagagtcctacttgctcttacaaaattgcagaattcaggacgtataaccggctttcacgggaggttgggagatttaggcacgattgatgatcaatacgatattgctatatcaaccgcttgtcccaggttagacgatatagttgtagaaactgtggaatgcgggcagcaatgtatagatcacttgaggaaaaataagttagggtatgggcgtttcattctcttggataaattacgtaaatgcaatttggacagaatagccactcctgaaaatgtacctaggctttttgatcttataacccctgtccgtgatttattccgacctgcattctactcagttctcagagatacgttagttgccagggatttacagcaagctaatcgagtagcctacgggaaaagaaggttcagagtggtcacgttggatgggaaattaatcgatatttccggtacaatgtcaggagggggttcttctccccaaagtggcttaatgagatcaaaagctactacggcaagtcaatattctcgcgatgaagtggagaaaatggaagtacaactttcaaccaaagaaactaattataggtcagctctatcgatggtccatgagatggaatctgcattacaaaagttaacagatcgtcttccggagattgatattcagatttccaaaatacaacttgagaaaggatctcgggtcgctgaggtggaatcctatcaccaacgactatcacagcttgctagggaactttctatgaacgagaagaatcaacagccactgttggatgaagagaagaaactagatattttgagacaacatttgcagcaaacaattgatgcttcaaagtttagccaagataagattgatgatctcaaggatagaatcatgcagaaaggaggaattgagctcaagatgcaaatcgcaaaagttgcctcacttgaacaacacattgaaattttacatgaaaagcagaaaaaggagaagaccagaagtaagaagcttgacattgatctggctagagcgactagggaaaagaacaaatattcggaagaagttctagtctgtaataaggatatttcaatactttccgaacaattggaatcaattcgactggaaaaggaaagaattgaagaacaagtaatcgaaaacaatgaaagaaaagcagagttgaactctagcgtggagaaattgaaacaagagcttctttctattgaaagagattccaatgagtttaaagcaaaagaattagagtactcagatagattagagaagttgcatgggctacaagagtatgttaaaaaacagctgagaagttatgaaacctcactacaaagtcttaaaatcagagacgtttccaaacttttaagtcaattgaatgacggaataattgagtcatgcacagatgtaactgctaaggtaatgaatggtgacatagttcaaacgcagtctatcacagatgtcggaaataatgacgctatggaagattctggtgaagctgcaacccacagcgggttaccaagtttgacggaaaccgagttggaaaatctcgatttagaaactctagaacttgaacttcatcaattacaagactacttggataactttaacggagatatagaagtactagaggaatacgcacgcaggcttgcagaataccaacgtcgaaaactagacttaaatcaagcagttgccaaaagggaagaagtaagaaataagtgtgaaagtttcaagaatgagagactagagaaatttatggaaggtttcggcatcatatctatgactctaaaggaaatgtatcagatgattaccatgggtggcaatgcagagctagaacttgttgatagtcttgatcccttttcggagggtgtattattcagcgtcatgccacctaaaaaatcttggagaaatatctccaatttatcgggtggtgagaaaactttgagctctctagcattggtatttgctcttcataagtacaagcctacacccttgtatgttatggatgaaatagatgctgccttagattttcggaatgtctcgattgtggctaattacatcaaagaacgaacaaaaaatgctcaatttattgttatctcactaagaaataacatgtttgagttagctcaaaatttagtgggaatatataaaaacaacaatatgactaaaagtacaaccctacagaatattgatattttacatagttcctaaattatcccctaatgtacgattgtactgatcttcagcaacatagattagcttctgtaatggaaccactatcaattgatgtgccataccagggaatcttttcctgttaactccaaaccattcaataggcggtgtagcatttcctagatcccttaaaagtggcatctcgatgtgtggctcttccaaaggaatatatttatattttgtgccaagattcacaattttgatcttttcagcaatgttttcgtcttcgaaaaagggctttgatggagatggctcagtgtgacctcgtcttacagataatgcacgtacatgggtcgcccacatttccctgatgaagttaattgggtcgagattccacttgatatcgactttatccccaaaactactggaatacaagaactcaatgtctgtgtcagggattttctgccaagtggtaattccaacaaatactgagggagccgctagaattatgtctccttctaaaagagcagcttgtctgttgtactcttcgacgctcaattcagcaaactgctcttcagttaactcattcttaaactgagccaaactgatatttatgtcgcgtatttgccatgttagatctgttttcgttttttgctcagtctgagttgcggcttcaacattcattttatttgccttcagcaccaatacttcgctatcaaataaagtacttggaaaaacatatagcctgaaagatcctatttcagcagtcaaattagttcttaaacgaagtggcgccagtaattcattatttgagaaatgaatctttcccgaactttcaggatttgattcctttagggtctgtacgtaagactttttattttcgatcctcattctggcaaatgttgcatagatatcgtagagattagcagaagccaaagccgttaagaaaatattaacggatccaaatgacatggatacaattaacaaatctttcaataatccactttcatccctctcgttacgaatagctaattgcaaatccgacacacgagcgattaaaaaagagtggtaatcgaatccaatttttgaagacaggtggctcattttgaaggctaaatttatcaaaggcgcctcgaatttattgtctttaaccggccagcttatactagagtcaaaaaatatgtttttaatttcaaacaatccacctaaacgaccatcagacttcgagtttaattcatccagataaaagctgacagagtgagaccaatcaactctgtggtgagacgatatccaaaatgtaggcactttgaaattaattgaacctagcgatggatccatatcaattacagctgaagtgtttttgaagattatttggtaaatccacggaattttaggagttgtgaattcggtcagagcttgaggttggcatttttgcccagagtgtggtccagatcctagtttctgagcttttttagtctttggagaccatatgtcaagaaataaagtgatctcttgcaactgtttcatattaacgtaaaatttcatgtcggatatcagagtatttccatatgttttgatggtgttttcgtgtgttaacataaaatcaagatatacttcatttatacccgctgaagaactgatttcacgagaaaaaatatgtctggtactgatttcaatttctgaccattgtagtgatagagacagcggttcggaatgatctggtgagtcggtaaacatcgagattctgaagttactgaagcctaggtctgcttgaatttttgctcttggctcacatgtcaatgtgatattttgagctccaacgtttatcactatcgctgtgtcaatttttttgaataaatttttgtagtcgaaagaaatgcgctgagtattagttgtctgttcttgagttttatggaccaattgcttcttttcagagttaaatctttccatctgtttctggatttctgttgtgagatttactaaaactggaacgcaggatgaaaacaaaatgttgtgagttgattcaacatttactagacttctgatccaatgctgcttctgcgaagggaagttgtgcatatagtccaaggaaacttctattgatggactagtgagctctagcgacgatttgggagaatcttgtgcaatatcatcgggagtgtaaagatttattataccacctccatatttggcaatacaatttattgaacgaattgaaaggattgagactttgtcacttaaattctcagccacattatgtgttgatatcgaacttttcttaatattactgatttttgccagcttcttttgaaagctctctattgaagacctcataacgtttacaatttctaccgaagttgtcagtattctgacatctagcttgtctgcgttcattcgaacaaacaagtctttttctatgaattgaccagaaaaccaaaaatttatctgcatgctggacaaatggcttcggttcagttctggaacgccatttgcaaaaaagaagttattggattccttcccttgtgccgtagccacatacccatcgacaatagtaagttttccgtaaggtttctcgtacgcagcgaacaagctttcgtatccaattactatcccattttcatcggtatcttcctcgaagatccaaccgagacatagtttattggaaagaatgttgactgataatgtctcgaagtaaggaggaatttcgattgcattggaagaactgttaaactttcccttttgtttaactttctgaagtgaaacttttgcttcctgtatgaagaatattacagcaataagcgtggaaggggccaacataactctcgaatgaggggtttctatctgtagtgtcttctttatatcgtcttctataagtttcagtgcaaatccaatatcgaatatcttagacaaagttggcaaaacttcgggatttagtacaaggatacaaacattttgaattaccaacgacatctcgcggagattgtcatttgcatgcgtttcttctaaagcctctgctcttgatgcgcaagagaatgcagtttcattaaattctagaacataatttgttgttttcaagtcagttagcaggccaatgtatattgcattcattttaaaactgcaaggcttgaactttggtgcagctggttcattgtctgcattcttgttcttgaaaatcttaattagttcagataccgtaccatttagactgtcggtgagttcttcaatgtaaacacggttatctgatagtgtcaatttcacgatgtcagtgtctaatccaatgtcagtcagcaaagtattacttctataatctaccttcgtgacagaattggagattcgcaacaatttcaactggttaaaatagaagtccaacaaaagctctgtataattcacaataattgaaataccagaaagatttttgaaattgaagtctaaaccactgatcagaatgcgtataataaaaggaacaaaagccgaagtttgaagttgcaatgatccaaccttcagggagagaacccatactaagtcgacgtgaccattttttttttctgaatcatggtcgggagtaatggctttcatatcatctattgaagctaggagggcccgagcatgcttcatcatttcggttaaggttaggtctgatgagtctagtactacactaccaatatttgaagtgaagaacctgatattttcattttctgtgccaaagaaatttgctgtaactttctcaagcagaattcttgagatgatacggtcaagatacaacaaattgaatgaaagagtttctgatgagaacttggcagataacaacgaatttatttcagatgatgtttctaaacccgcaattgacaagtcttgtaggtccaaaagcatcatatatttttcaattagcatgtgcaaagtcagctgagatattcgaaaagatgtctgataaatttttgaaacccaacgatttgttttgttttcaatgtcggtaatttgagggaaaagcttctgtttcaacaaaataattctttcaataagttgcatactggcgcgtatgtcagcataggaaattagtaaatcgaagtctatttctttcttatcatatcccattgtatcgaagtctagtatcgcatcatgtgacatcttttttacacacaaatcaatttgtttggcaatgattgaggattgctgtggtgcatatggcagttccaaatgtagcatttccaatgatagcgataattcattgaataaatcctcctcatgaacagtactctcacctgaaaatagtaatgtaaacaatgagctttgttccacttcatacacatcccaatttttccagtcaacaaatatatccaaaaactgtgatttatccttgcagatgtttctaacttcctctgggatgtcatcgcattgtgaagttgtttcggacacatgcgacgtatgcttagaaacatgtcttagccgcgttatgatcttccagcttgcagtatcacgcacatgaaattttgacaatctcgtaatatatgctggtttggtaataatgtaagggactgagtcgataccagaaatctttcccaattcagcaacccggataattgtttctttcatgtcgatgcttcttaacttgcctaattcgatacatgactttccttctttgcaaaatgcttttgctagtttaaggagatactctaccgtccattcgacatctgcgtctaaaatagctgatttgatagaaccgaaaattaatttcgaaactttccctacatcggaaaataatactgtattgaacatcaatatctcaaaccaggcaatcggtagcaccttggttaacctattttttgaagatttgaaaatgttaaactgtagactatcgaaattgcacgaaatcgtagagtcatctgtaattcctgtactctcattgctctgttctaggttctgtggatattttaaaattttagaaattactgatatatttgatactgaaagctctaagcggtcaagagcttccaattgtgttttgtctagtgcagtttcatcggatatgttaacttttacgtttttgagcatgacagatgaattaaaaaactttccgttcgtaatgtgacctacggagaatatattaacaatgttcatttcaaaatagtccattatgctctcagtagacattgttagcatgaaatgagcggcgttttcagcgaaggtaaatgccttgggggtaacaaaaacggacaaggttgaaatattcacagttgtattttccgattcaaattcttcggcaagctgtccacttaagtcattcgaaacagtattcgatagcggtaaaagacgtttatcatcaggtctatcatctgtaagatttttagtatctataatgtcagtgtcaaaattgataaggttaatataactccccaataagcgctcgtaaatattatcgaaagtctgaaacgttaatggttctgagagtgtgggcaaagaaatgctaggagtaattgatccaagtagatcatcatatagggtagaatgattgagctgatcaaaagctaaaagaaacttacatcggtggaaaggggaatcatttaaaagtacgcagttctgttgtgtcactcgatgatttttcatattgctccgaacaacgaatttagtgagctctacggcggtgtcgcaggtgaataaaacagtcttcttttcatctatcgcacaaactgaaatagcagccaccagtaagtcaactcgttttgaatatcttgagttacttagatcccaggagttgatagtgatatcatttaatgacagagtcgcagacccgccgtgattggtacgtacaatggaggaaactcttccaattgatattgtcaatgatgttacatcctctggtttgtggatgctgtatatcagaatattttcggcatctttatacgtaaatcccactttttgaatagcttccaggaatgaaaataaaaactgtccatcagagtcagtagaaagcgagccaattgaaatgtcccatttgcaaaggtacgtttcttccactggaggtacaccaaacatcctatgaccatgcaaatttaagtcatctaggtaaccagtgttttctgaatgagattcctctatcgccacaactctattaaaggaaaattcattactatgatttaagtatattcttgagaaaaaagctgtcaaatccataaaataattagtatatctcatatcaaactccaacctacggaatgataataagaaagacctttgacaatcgtaaaggttttctggaattattatgcatccatcattaacgaaaaaggtgatccaaacgtctgtctcgtttttggttctcaatagcgatgatttgtgaatagtattttcattaatggtgtcagcaacctgatatgagccatcactcgaggaagaagtcaatgattcgacatcattagtcggttgctcttgaaagtttttggttttagttttggtgtcttcctccatactcaaatcattactgtattcttctgtcgttttaaaatggttaaagtccccaaaataattgagcttgatgttcattaagtatctgagcacaaatccaaaggacaagaacttcgtagaggaacttcgaaaatcgataagtatcgtgtccgtgttgtcaacatcaaccgacggaaatgaaatataagttcctgtcattgaaaagtccgggcattctccaaacgtcgtttcagagaggaattcatggagagtattccaacacggaggatgtatagagagctttacaagaggacttttgagtaagaaagtagtttcgtgtggctccttgacaattgacgtgaatgggagattaattgacgtattcaatatgtcaccgctcaaagacaaaaaacaattctcattcaaatcaagaaggttattgatgatatttgcgtcatttacgttcagaaatagtttgtattctgtaaaaacccactttatctcgtaagtgaagggtctaaacaattcatatctcagagcatcattcgcagaaaaatcggtaaaaagatcagaaattaagctaatatgatctcggagaagaaacagttctgcagtcctactatcaagctcaaacaaccagtccgcctgtttgttccaacctgttggatatccaatattcgctttaatagtctgggtgttgcatctaaatagcacttcatgattaacactagattttatttccggatttagtaaaaggacgtagagctcatttggtagccggtcggcttgggaacataatgcaagattgaaaagaatctctcctccctcgttgagagaaacattaagccaaccaaaggccctatgagtatctccagttgttttatatcttttgatgaactcttcatctttactagactctctagttggaatgtgcaacacgcttttgtctcgaaaatccacagataatttgaagttttcgtagattcttaacgatcccggttcgggttttgtagctttcatttgatctcgggatactattggagaaaaaagccgtataatatcctgcatatgtttatgagcccaggggccataatatactgctgctgtataaatgtgaatgtcagttccgaaagccggtgtgtcatcatcttggttgcaattcaaactttcatccctatcactctgagagttgatggaagagctgttagcaggtacaattcctggtatgtcaaagtaatatgtcaaagaaactctctctgctttcatcactctgctgtagcgtgcatattcctgttcatgaagcactgtcgtatcgacattttcctcttgaactgctttggtgtggtgatatagatcgagacccttccaagaatctatatacgcctgttgattgtttattgttttgccttggttgggtagcaaaagctttgaaatcgaaatgcattgttttttgacagtctgccaaattttatccatagttttttcaactacaaaagtcttgatgggattgtcattctggtatcctaaatttgttcttaactcaaatagggcgtcgtataaatccagtgatattttcgtcctgtagtagtccagatcgctaattgaggaaaaaatatcgtaaacaccttttgcttgctcgaatttgaaaacacctacatgtctggtgtttctattacccaaaacaatagctgccctgttagcttcaagctgtatggggaacagcttggttttggcagataatttgggtgcatccgtgctctttgagcggccagaataactatatcttgaactgttggataatttggaatttgcagcagctttttctgtatttatagttatatcatcgtttgattccgtttcctggccatctttcgtgacgttggtgaaatgatctcttagtactgattcgtaaacgtcaattttgttatatacgaaaacttcgagaccatcgcattgtaaaagaaacctgcaaggaagtttagcgttctcactcgcatctccatcttcactttcaaaatctattccgcgaatccttgtatgcaataaccaatatctccaggtaaaactaccctctaaaaatgagattgtaaaatcattcgagactactgttaaattcttgaagaagattcgtccacctagaaaggacacctttattgattgtaggtttattttaatcttatactgacgccatacccagaagtccaacccctttgtcagcacccatgctagaattctacctaagtaaaatggcgccaatatacataatattaccgcgagtatccaatccactaaaaagggtacactaagatccttctcgtccgatatagagatcggcctaaaggttgaactggaatccatgttgctgtatcatatgcgtttgtttcgatatatcagatgttgcttgtattgattattcattcatggttagcgtctgtcttgatcatatttcatcagtgaacaatatttcttgatatcaaaattgaaaaggcattttattttattgagacatattcagcaaacgataatggaagatagaactttaatacaaagttgcttcctgtagagccattgggtggcatttaatattctcagcctaataactagaacaaagtgattaagtaatggctttagtagaaaagttacatcgaagaatcatttcaattgggcttatcccaaaatttatctcgaagctttcacaattatcgttgttatgctgtgtcattggtttgggatggttggtatttatgttgccctcggacggccagtttaggagaacatacatatctgaaaacgccttacttccatctcaagcgtacagttactttcgagaatcagagtggaatatactaagaggatatagaacccagttggacttattccaatacgtatcaacaacgcatgatagtaatgctgaggtttctaaatggctgcaagagtttggggttaagactgctatatatgacgatgagcaatatggtgagactttgtacggtatctttcacgcaccaaggggtgatggtaccgaggcaatggttattgctgcaccgtggtataacgagaatcgtgaatataacactggtggtgcagctcttgcaatttcattggtgagatttttctcacgttggccagtctggtcaaagaatattatcatcgttctaagtgaagatcctaaggcatctttgagatcgtgggtcacagcatatcatacgtccttagatttgacaggcggttcaattgaatcagccatagttcttgactacccaggtaccagtgacagattcgattatatggaaatacactacgatggattgaacggtgaaactccgaacttagatttggtcaacgtggctgtacatattgctgaacacgaaggcattaaggtgtccttacacggtttgccattctcagaacttgatagaaatgactataactcgagattgaaaacgatgcttttgggaataaaagactcagtactttctggaatcaagaactgttacggtaatgaagcatttagtggttggagaatccaatcattgactttaaaggctaaggggattgatggaccacacgacatcacaacatttggtcgtgtgccagaggcattgtctagatctgtcaataacttgcttgaaaaattccatcaatcattcttcttttatcttctactagcacctcggtattttatatcaatcgggacttatttggcgactgcggtggctgtctcggtggcctttgtattcgcagcattaaatcaaattttgaataacaaatatggtgaacttccgttgctgtctatatacaacatttggtcaattctaacattctgcatttctttggtatttgcctttgctacttcgcaactattcgtttatttccctctacctcgagtccttttgggactcagtggtatattttcggtgcttccgctgctttcgagaactagactaagaatccaagaacctttctcatacagatttaaagctttcgcatacatctatatggccattgttttgacttctctattagtattgaatttctcacttgcgattgtgatgggcttgcttgcattcccaatgacaagaactacgacaattatcgagagtaatctaaggctgtcgataaaaaaccttgtcttgcttataatatccaatcctttcattgcaacttgggcagtggtgaacttcgtggaaccaagattatctggtttcaaggttttttacgcccttattgaagcttcgcaacagttggggtgttggacatggtacatcatttgcttaggatggtatccgagctggttactagtaacgtatgctagtattgatgccattgaagtgcagacgcccataaaaaaagaataaacgtctatattttagcaacaagtgttatataaaaacaaaaactactcatcagcaaaaggggcccgcttattatcatcgtgtgtacatatatgtaattgctcatatatactgagaagctttttaccatgcttattatgtttagagtatgatcgagatcaatttgttaatgctaagcaaaaccgaaaaaaaaaagtttgtaacgggttctttcatcagcttcagcgtttaaagtaaccattctcaacctaatgaagcatagcctggttgttccaatctctgcagtgactatataagatattgttcagaataaggtaatttgttcttcgtatcatttcaaggtatgaatattagtgatactgctgataaaactaccaacaaagagaagtctgggacaaccgatgagatgacatcggagaaagataaacttttgggaatcagaagtccggaaggcgaagtagctttgtaccctgctagtgctagtacagaatctactgaacctgattttaaatttgttctgcctgtcaaaggttttgatttaggaagcttttgcggagaattggatcaagacatgttaattgaaggtagattacaactggaaaaagagattaacaccgttaaaggtcaactaacacaaccaatatacgacttactgcactctgatgccttaaccaaagagaatctactcagagccagtgataaagttactaactctactgtggagaataaattcgtattgctaaagagacgctactacgttcaagagaatttactacacgatgtgaagcgtaaagatttagtagtatatgagccaaatgagctattcgacttaataatgtctgttcatgtactgaattcacatgtttcgtctaagggaatctacaatgaactttcgaccttctacgcaaacgtcactcaatcgttctgtaagttagtgacatcgttttgttctaaatgtaatgaaagtgggaacaagataagctataaaaaatttaaacacgagaatatacatgcaaatctaattccattgggtaggtgtcatgttgaaatctttgcaccttttgattcggcctatcaagggaacgacaacacggacgagttaaaaattgaaggaaaatatccatttgttctgtattgtagggattattactcaaggtatgtctggttagaacccttgaaaagtgttaccttatctgatctattgccagtgatgacaaaattattgttttccatgattaggatgcccatctttatcgacacatgtactttggatagacaggatatgttcgatgtttgtgagaatattgcaagaatatacaaaattaagatcggactcggaatgaacagctctaccagctttcagaaaactggaatcaaaagaatgaaatcgttattcctccaacataaggaagaatgtttacatgattggaacatgtgtttaaagttggttgtttcgagactaaaccaaaattattcagacagagttcgtggtgttccaagcgatttactatgttcaacacaacaagatttacataagaagttcaggacgttacaaagaaatgtcatctctagactgctggggcatcatgttgttcaatttgaagaagctggtggaatgatttaccttgaagatgaaaatagcccaaatctacttctttccggagatgacaatagtgaggaatcagagcatgattcagaaatattcgatgagctggcctcttctcgagatggtactccaatttctgaacaaccttcaccacaccgaacgaacatgaattatgatgggataaatcaagaatcggagaaacacaggataacaaaaaagagatctaaaaaggtgagacgtcctttagatcaagacaagcatgctacgcgagcgtccgtatacaacccgtataacattgctgacgtttctatggagctatgatggtatgtttttttagagtaaccgtaatacaattataaaaattcttcataaaagaatacttgatgatagatatttagatttaatgtaatttataccaaaatttttgattaaagttcaaattaaagaagttgcgatttatgttggcccgtccaaagcgggaaaattgaaataaaagtgacaaacgaatggtttataagccggtcaaatattaaatgcaagttaatacagccaattcgtatgtgttgcttgatcatgattcgtaactatttttgaaattttttagaatgaattgaagtggatgatgaagcatgctcaggcatacccagaacctaatcacggtacttgtcaaagaaggccttgtggaatttttcccatgtttctacccattcggtccctggtggtaggaatgtggttcttaagtgataagtacctgggacttgtccgaaaccagatcctggaacggtgcaaataccagtgttttctagtaatgctttacaataaaattcatcaggttccatttcaagatgctgagcttcctggataactttataaggaagatcgagttttggatataggtacatggcaccttgaggtttacggcattcaataccttccaatctagagaatgtttcgaaaagtttagaggcacgttcgtccaatgcgtcatgaatatcttcacgttcctgttgatcttgttcgtaagattcatcacctggttgaggtggagataccattaagtccaccaaggcttgaccggtaaccacgggacataaagaaatagaagccaattttaagaatacctgtctgatatcatgattgaatccgaccaattccatataaccacctctttgaccacattcacccgagacacctttggaagtagagtgtagagaagctaattgaatgttgtcgtattgtccatgataagtcttttgcaagtttctcaaaacttttttcattgagtagaatttagagcctttgaatacgttttcttgatacacttcatcagcgatgacgacaataccgtacttggcagcgacttcgaagatcttttgaatggactgttctgaaaggatggcaccagttgggttacctggattaataacaactagacaggtgggtttaattcccttctgaattgcatccagcacgacttgttcaatttcttctgggtcagtggaccaattttgttcttctctcaagtagtatggtaaaggcctagagttatttagagccaaagatgctgtgtacaacgggtattgtgggataggtattaatacgccagtatttgggcccttgcatagaatggagagaatgtaagaaactgctgcagatgcaccagcagtgaggtaaatatcttctgggtaagatatttcaccgtcatctctcttcgtaatgaagtctgcaacggtttctcgaattccttgaacaccctgtgattgagagtaagcaccgacggatccaccaacctcagacaaaagtcttttggcacgcttaatggagtcagtcttatatagagtttgtaaagcctcatcagcttcttctagcagttctggatgttgcaatagagataatacttctctgtaaaaagtcaaaggtttttggtccaattgttgagggttaccgatgttggcactgataatcttagagaagggtaaagaacttggatcctttttcaactgatctctcaattcctcagccctcattggaattctacctctaacagcgtacttagccttcaaaacattttcattaacatcatctagcgaaagctttggagctggtttcacagtagtagaaaaacgcaattgggttaaacttgttacagaaggcattgtacttttcaaagctggagcattgactctaatcatgccagaactgatcctggtcttcaagttaactctgacagacaacatcttggaagtgtttgatggaaagctcttaacaaaaaatcaaagaaaagttttttttaactaaagagccaaattcctctcgaagctgaaggattaaaggaatactaaacgagtaacaggaaaacaagaaaattcgcccaactaaatctcgaatgaaatgcaatcgataaaggtcacctaaaatgtattctcgacctataggaactttctatcttctttttctttcagtgtcagaagtgggagaattcctttggcaaatctaactatgagtcaaaagatggaatggctgaccaaactgataacgaaaaactaaaaagtgaaaatatatcactcagtcacttactcgcgcacaactgtacgtaacaaatgaacaggtatgggaataatagcgtagtcccgtcttgatgatcgaacgaagtggaaacaaatgatggaggcaaggattcaaagtatcaaatcgctagtaaccctttatctttttttttcctcactctttacttctccaaagccttaaacccaaaagaaaaactacttgaatttactttgggactgtgttgatctgaaattcaatgcttatttcagcataaaagctcatcattttgaatataacaattgcattaaagcaaaatagtgctgtaaggaaaaacgatacaatccggcattgcacatcaagggtttgcagttttcataaccgaaaagtaagcatcaaccgcccagtatttatatactatgtaggactgatagaaaagtggacaggattccaagttttatctcggtgtagatactatttaaccattattaccaattttgcgggtatcttgttgcaatcaggcgcactttaacttccgactttccaccttaagcttttttttttccttcgccctacgcttaatacagtgtcgtgaaaatgaaaaagagccagtactcgaattagccgattccaattaatattgatatcaatggcaagggaaatactgcaattggaagcgacacaacgagcgagatatgtgatgcgagcgtaggcgctgattagaatggtgccgcgattaaaataactcccggttctggctcatttctttcaattgtaacggtgttgcccaagcggaggcttcagggaaagggcaacgccagggcaggaaatatttgttacccggttcacgttatggtacttttatctcaatactggaatgcagcaagggaaaagtatataggtcattatggatcacgtgatttatatgttgcgtataagtatgttgacacgattgattcgttaccactatatatatatatatatatatttgttgaagtattaaggtggtacaccacctttacattatattatagatcgttcactgttaatcttttctttgttgcatcttgaaatccaaactttcatacttaaaatgacatattccgttttcaatgttaaatattcggagcgatttagcagcagtaagccttatgtatttttcactacaggtagattttcggtattacatatatggaaatatcaaatgtttaaaaagcagtatgaacaagaaggacatgtagatgaagaaggagcaataggttgtaccaggctgaccaacagtaacgtgaactacgacatggcacagaccccatacgatgtgttaggagtagagaaggatgctactgaggtggagatcaggaaggcatatagaaagctggcattgaaataccatccggacaaaatcatcgatgaagccgaaagagagactagtgaagctatgtttaaagaggtgacagctgcctatgagattcttagcgatcctgagttgaagtccaggtatgatatgtatggggactctgcgtttggatctggaggcaatgggttccccgaagatgatcacgaatttgatgatttcatgaatttcttccagcagtaccagagacagcaacacggacctcacgcaagctattcaaacagacaccagtatggcgaaccagagagcaaacggactccggactcgagaatatcttataagatgactacacgacagttatacatgggtaagacagtaacgttccaactgaaacggaaatgtctatgtcctcactgcagtggtacggggttgagaaagaagcatttccagaaaccagagatttcctgtacatcttgtaatggacaaggtttcaaagaacggatcactcgtcttgctggtggatatatggtaaaggaccatactgtatgtgacgcttgtaaggggaagggcagatacaggaaaaaatccgcctctgacacttgtaagcattgttctggtaaaggactcatcaacgaagaaaaatctcaaactgtatatattccaagaggttctcgtcatggggatgagtttagactaccacagatggccgatatggaatacgggaaggaaactggggacgttatcatcgttattgatgaagattcctctaagtctcatttagaacggaagagtaatgacttgcatacaacgttaaacatttcgttagtagatgcgttaacaggtttctctacaattgtttgtgaaacttacgataacagaagattacgtgtaaatgtacccgcgggtaaagttattaggccaggaaattacttcaagtttaaaggcgaaggttggcccttatccaatggcgatagttttggtgatatgtacgtccagataaacatagagttccccaaggataattggttcaatgagaaatctgagataactgctttgagaaatatactccccgggttaaagtcaaaggatactaaggacccagatcctctaaatacagaagacgtcttgagttattctgttttgcattctcacgacgagttgccggattatttggcagaggagaaagaaaaatacaacagaaaacaacaagaagaaccacatgctagtgcgttcgataatgattatacacaaatgccgtctgaatgtgctacccaataagaagcaataaacgattctttcatttatgtactgtttcatttgacgtgatcaaagtccacgtccatcaataacctaatgtcaactattattctgaaatgaccactccatttatcagcagaagtaaaaaatacgtttactgtccccaagttttcttacttagcagtacctgtataaacttcttcttgcatatatttatttcgatacaagtaataaagttaaaccccaatgacttgcatactgatccactctccacggataacatgaaaaaatatacctcttgaactatttattacatgatataatacatctgcagcattatagtacccgttaatctaataaggaatttaattctagcgtatccaatccttgtccgttatattcctcaccaagttcgattgttatgctttcattatcagaatccagttctagattgtgcttgtgattgttatacctggtaggggaaacgagatcttcatctgtagcagctaaacttataagttctggatctctttcttctgtatcaaacgttattgattcaacctggaatggagatctatgatgctgaagtttctcgatggattccttatcaaaggggtcgtacccattaggtatatacggtagttctttttgtctcttgggtgcatactcaatgtttagttcatcttctttctctctgataagggcttttaatccgttgccaaacccaaggtttaacgattttccgctgggaaatatgggtaaatcatcctcctcatcctcctcatcttcgtcgtcattcttttcatttagctctgtatctttcagcaccaatgacttcgttcgtggcataaaagtgttcatccccaggacacttccgtatttcttcagtttattttcaggcatattcttcataaagctactggcgggcctttttaaagggtgatcactctttcccaacgcagcattattcttcacacttagtatagattgcgtcctgttattatctttgctagctagtgggcgtctgttgccccgtactaatgagtccgtccgcttcatctggtttagaggggtcctcagacccaaatcattgtcaggatcttggacggatatgatattctccttcccttcgttcggcatagctatttgaatctgtatatagccaatatctcttctagtctgacttcacgctagcttaacagacaaaattggaatatcttaccgttgattgctcggctttgaacgaccttgagctcttactgtttgtaaattttgagacagtttttgttatgtttgtatatttgtgttgttgtttttgatcgaatttggtgaatcaaactgagtatatgtggtgtatggatgttacggtgatactggatacatcttcattgcttagtactcatgaaaatactccaaaagaatccggaatgtcgcgatgctttgagactatgcccacgtcaacaaggagcagtagcagtgcctactacaaaatgtgagtttgtgtcgctgttcttcctggtttcgtttcgtgtctggctttccaaattgcaatatggaatagtaagtaggtacgaaaattttctagcctagagcacacacatgacgatcttcatacagagaacaggctcggaagaggttctgtattaatctaaagacgaaggttattactgtttaaaataggtcataatcgaatggacatactgtgaagtattgtgcgtatttttttgacaacagttttggaggttgacgatgaaggctagtcttctgagaacttcgaaattatacaagggtcttcattcaataactaaagacgccatttcgaaggtggacactttccccaagaataagcaacatgaaacgctacatcggttaaactctttcaatgagaatccaacacgcaagaccttggagaaattagtctattctgttcatttccatttgttgaacgatcctcctaaacacgtagacatattgagacaataccctaatgagttggcaaaattttggccctatgaaatgcagcactcgattttagaaatggatgacccaaatctaacatctcaaacgattttatggtctcgtaacaataaggatgctttggatttcttgagcttcaatcgtcataagtggctgcggccgaaaaactggcagactccgaatgaggaacttataaaagatatcacaggaattgacggtcttcaatcaactcaaattacagaagtattaagactccctgcagaaaagataaaggagacactacggcaaattttcgagcattactatttcttgaagacaaatccgaaactatgcgctacaaaaaaactccaggcaccaatcgttgagatcggaatgaaacctgatggtttcgatatagccgacatcaggatcgataacttgtttaagaaaaaggtcaagctaattagtgacctgctctactcgcaaaatccggtgctgacttcagatgcagagtctatattaacgtcaatagttaacgacccagatctcaataggcgaacgaaaagattgtataaaaatgttgccagcagatcttaccttttcaaagatgggaagttcgaaataagtgaacttgctagaggcggatttgtcctgtcgaaggaaaatttgagcgagaacttagctgctgcccttgaggaagaacataattgacttatgaacacacatcacgtgatatataatttacctacagctaccattttagctcaatgtaaatagaaaacactttaataataatgttagccaggaaatgaaaccgccaatacacttattgtaacagactagtctaagaccgatttgaagtttcagcggtttgctagaagccaagtttgttcgcttccacagatgctttcactatttccaacatccatcgatattttcatacatttacattagtctcgagaaagaaaaaatttgaattcaaagaaatcaaacgaagagaaaccaggacatatttcttgaagacgaagtctcctaaaagtagtcgcccgaactactcattagttatcgataaggatttaattcgaagtgaagaacaattaaaataaaatctcatccagtcgttatgagttttataacaagaaatcttcttcagtggacctcaaaacgtacattaaccagtttctctagtttctcacctttaagaacactagactcacgtcttcatagacctttggcgcaagtcaatccaatggaaatcactttacaatctcaaacacaagcaaatggctcatcaatatttggtatgttgttcgatttgactcagagaagatggaaaagtagaggtaacactttccaaccgagtactttaaagagaaagagaagagtggggttcctagcaagggcaagatctagaagtggacaacagatacttaaaagaagaaagaataaaggcagatggtatttgacttattagttctgttcaactttccaatcaaaccaggaacgttatggaagcgcctgattataaagaatggctgaatctcctgtatatatatccacatcgtcattatgtattttaagaaaacggaacagttttgattttagctttgccatcagaaagctggcatgacattaagatgattctatcggataggtttatagttatcaattgcagaaggaatcttttttctattaacgatttctatgtacatgggcattatttctgaagtaagtttcattctatcttgacaaggacaacaattccagttattgttcataaaaattgggttgctttattaagcaaagtcaatcacaataccaggaccgtgtgtacttgtcagcgtagtttgggacaatatgcttggttttttcgtttgttgattggtgatagattgtttgaaagccttctgtgttgccaacaagttctctagaacttccttgtcagtgaaatgggtcttggcaacacctaaactaatactgttaccacgttgtctgaatggaacagagctcatactatctttaatcaatggctcaagatcttcggcgacggttcccttcttggcagttggcagtaaaccacgaggacccaaaattctaccaacttgagaagcaagttgtggaacaatatctggagttgcaaaagccttgtcaaagtcgatactgacttcaccagccttgatttgacttactaaatctgaaccgccgactaaatgaacactgtatttatctttcatcaaagccgcttgtgcctcgtcattagtgaagacagcaactttcacatctttaagaggtttgccgaaggaaacattacctgtaagaggggggacacctctttctgctaccaccaatgtagttaacgtgatggtttgttggcttgctggttgcccgacttcgattgcacgtaagtatcttagtgctctagaaactggcatatacagtggatggtcactggccggagtttttgcttgcaatcttctttgaaccatttttcttagctccctctttctaagttgctctttagtcaacttagtacccgtttcttccgctagacggaaggacgttatctggaactgcctggtgaatattcttggaaacatcttgccgaccctattagcctctaagtagcgaaattggaaaaaatctcaggttattcagagacacaagtctttgaagtttttacgtgaaatagttgaaaattgattgtatcctctccaaagggtaatataacgtcaactcgttgttctcatcgttcttgttaacgcttccaagattttaatccaactaatcattatactaaagctgaaaaaattttgatacatcgacaaatccgggtaatatgtaattggtatactgtttatgtaggtgaataagacgaggaagaagatgagttatctatgatatacaaggccctggaaagaccacaaagagcagtttcacataatgcctatctgcataagtgtaccttacagcttcttcttttgttttggtttgactttattttcaaacgaaatccatttagtaggaataccgtagtcattcaaaatagagattacgattgaaccgtgtggaccctgaacctggacttcagcagttttcgtcgatttagactcaccaatggtggtggatccgctgcacttctttcttaatgcagcagctaattcttcagagtcaattttaaacttttcaaaattagtgactcttgtgatgaccttcctaccaattttcttctccgtgacaatttcaagagttgggatgggtcccttctctggtactttgagaagcggttcaccattaggcttgtagatttggtggtaggtgttgaagttttttgagaggaaagtgggcgaaactattagccctcttgcaattttctgtattccaccattttggggagctctgttagacatttgataaagcgtatcatcatatttgacaagagatttgttctccggatctattagattgttattggcgacatacaaatctagaagcttttttaactcttgttgagtgtagtaactctgtgggacatcggcggttattccggtaatgaatctttggcatgcgctcattggtttataaagattttcaccagaatatgctgttatcttgtttttatttgattggtttgtagtatcacctgaggatttcttagcaatagttgccaaggtcttgtaggcttccatgtttgttaaatccttatgattcttgtttagcgagataacggtgcaactgtcattcttgccctttagcttcaagaatccttcgtcttccaaatatttaaggagtttagttgccttcttccaggaagacttcttgatattcaccatattggtatcaacatcgggcaagttcttcattacatggttagaaatgaaggtagacgcgacaataggcaatgtgatcttgtcgtcaaatttaatagaatacttaactgcgcgcatcaacatgtgatcgacgtcttcaatgctcatttcttctagctcatctgcaatttcattcacaggtgactgactgctgcttctttctaagtgattgctctcctcatcaagctgttcaccatatttgctagtctgtgtttctattgctgttgtttcaatgggttcgctgttatacacgacagctggtggttccaattccaacttgaaagctttgaataatccatcatcaaggtaatgaacaaccctcacggcaataccttttgttccaataacgtgtgatattccgcagagatccatttctgcgataccaatagcttttactaataatgggtcctttgtagatgcaatcccaacaattgagcctcttttcacgtttgaaggaaatggaggaactgtgccaggtaacatcaattgggcacctcctaggatgtgtttttcaatgacaaagtcatgagttaagatgatcggaagtaactgcatttgaagattccataatgagaagatagtaggatacaattgatcctcaaactttgttttaaaccagattggcttattactctcatcggtgtaaatggagccagcaacatttgctacttgaaaactcgtttgtttgataacagctgttggcaaattgtattcctcattaatctgtcttttaatggtcgattgtaacttcttgcggtcactgtttttgagattcgacaaaggcttaatatgaggctctttggcaaacatagtcaaatattcggtctcttgggttgctgccaccgtcactaacgaattatgggcttgcttctattctttttctatatgcaattaaactgttcttattgttaagaatagtttctgaaccttaaactgtacatttactttttttaagagttagagatgtataaacagtaatattatacaataatatagtggaattctgaaataaagctacaaatatcacattaataaatagaagcacgagaatatagtaccttttctttcggctctcacaatttaggatcaagaatgtccttcagcatagattcggaactattactacagaaatacgcttgtggatattctgctactgtttccgatgaccaatctttggtctgtttgtggaatgtgcataacaatattgaaatatacagaacaaacggcggttatttgataaatagactcaatgatgagatacagaatcacagactgatagatgtcgtatggcacggtaatgatctcttttgttgttataatagcggcacggtttctatttacagagaaggacgcgaacttgtgaaacaattgacgtttatacccaagggcgctaagacaaaatgtatattatgtgataatttggttcctagtgatgaccgctattccttaagtgatgggaatctattgaactctatgccaaaattgaataaatgggacatgattaaaaatgagctcgacaatgagctgatcttaaacagtgaattagggaagaagaaacccattgatatttttatggcaattgattcaaaaaccaacaagttgattttgtctatcgagggtacccttaatatcaaagtaggtgaaaagttaaaacttccgaaagatatcaagaggatcatcaaagtgtcatcaggcaaatatatgtgtcttggtaaagattggagttatcaggtgttagacctaacattcctacaagatccgaatatttacaaattgatcaagacaacacaggagtatagtgccctcctccgatatttaaaacagttgcacagacacctgagaatgaagctaacggagccttacttcgagtttgttgaaacattgttaaaggaagaacacaagaacgcattacaagaattgttttatataggagtaacaaagttggaagtcatggaagaattgcatgaagttcaattgcagacgttcagattagataaatggagtgcactttctaatgatctatgttccaatagcatcggtctaatggtagcatgtacgataccactattagagagaatgatagttttagcagctagcattgaggcattgtgtgaagctataacctggatcaaatttcctaacgaaatctgggtcggcagtaaattacgagaacgaaccgtcgaaacgctgaaatcagtcagatctcaaaccgactccataatgaagaacaaaaaaactcaagaattgggattgatgtggatacggtccctgagcgatagtctttcaaagatggaaagaaacagggatcaaatatccccccctgaaccagaaacgaccaacggcagtaataatttctcatttttcggttctagcactggaatcactggcgaagactccaagactctccaaaagcgagcagacattaacactgtggaaaaattccttgccaaggatctactaccagaaaagcagtacgaatgggtcaagacaagcttccctaacttgattcttgaaacacaggccgagttcgataagataataaaagactatacattgaaatggctgaaaagacaaatgtctgtcgaatttgaccaaacaagaaacatccaaactggagacaatgtcgatcagatctgtgatattcgaattctacgccatgaagattcttcaaaacgggcgttattagtaacacctactgaattgattctattaaatttgcagacacagaaaattgatgtccgttcaccacttccattgccatcgcataaggtggcaatgacccttacaagacacaacactgatccagccgctctaccactcaaaaaacagcagtacaagaatccaagacttcaattggtccctatatctgctggacagccatctctatctactgcaccggtccaaaatatcacagaagaggttttctttctattgccgttatgccaaacagtcacagttttcattgagacagccgtcgcttctaatacagactcaattctgagcccagacggtcgctctcattccttggccgtggatcatcttccacattccgctgatctgacaggagaatcacatgacttgcatcggcacacaattcgaatagtttaggttcatctgaaaaccagaaaaccaagaaaaatgcacgtggttttgtactggtaattccaggaaaagcatgaaagcgcaacagccaccgtttatttctttttgttttgttatggctcgagtaaggcgccacgctagaatagcttgtaatgctgttctttactacgacgccacaagcgtgaaagaatagaaaaaaaggcagctatgttctcgcttagtaaaagatgaaataccgaattgatctaactcagtatccactacgtgttctagagggagaacagaaatggtcgttgaaagtgactttaatcacttctgcctttcagagggtttaggcatcttgagagcatagcatacacagctgtgataagtgtgtgcaatgcaacgagaatgagctatggaatcaatacaggtcacgaggagttatcagggtttcactactatgttttcacctctgtgactactgtgaacgttgaaatatgccatactgcttcctcagttttttttttcctaacagttttgtattaccaatgtcttttgaatcacacttgctctcgggaagaagtagggttgggtgataatgattagtactacctcaaattaccggacgaaactctggtaattctattgcaaatatgagtagcaaaggtcaaaacgaagaaaactgggcacacatccatgatcgaagccaggctgattcaataaatataaaaacatgagggttttgagtcttgaatctgtatctgaagctgttgcaaaacattattctacaatatggccataagtataaaagctcataattggtctaaatctattagctatatatatccaagataatcttatatctaggacatccaacaaggaaagatgacgtctcctcagcagacttctgtcagtggaaaagagtttgatagtttggatggagaaagcagcaatcaatactcagtaggtcctgattttgatcagttggaacaagaatatgacgatttgaagactagtgaaattattgcaccacatattagtaatgggcacagtataagctcttcaccaagacatcatcatttgtatgaagacagacatttagattctatcatcgataccaacacgcatggtttcaagaaacatgataatgggaacggcaagtttgcagatgtcaacatagaacagatttacaattatgattcattacgagttcctaactatgaggaaactgttgtagatgcaaaacaactatacgatgaaaaactaaggccatatttgaccttcagtgcaatagtagaatatttgacgtctttattcccattgttgaaatgggttcatcattataactttaactggctatacaatgacttggttgctggtattaccgtcggttgtgtgcttgtgccacagtctatgtcatacgctcaaattgccactttgcccgcccagtacgggttgtattcttcatttgtcggtgctttcatatactcctttttcgctacaagtaaggacgtctgtattggtcctgtcgccgttatgtcattggaaactgctaaggttattgcaagagtgttggaaaaagtcggtgaagataatcctgaaattactgcaccaattatcgctaccacattgtctttaatttgtggtggtgtcgcactaggtgttggtttgctaaggcttggtttcctagttgaatttatctccttgaacgccgtcgctggtttcatgactggttctgctatcaacatcatgtctggccaggttccaggtttgatgggatacagtaagaatgttaacacaagagactccacctacaaagttattatcaatacattgaagcatttaccggataccaaacttgatgcagtgtttgggctaatcccacttttcattctatattcttggaaatatttctgtggcacattaggtcctaaattggttgatcgttacgttgcaagatctgacgtaaagagagcagccgcttacaaatatattttgttttatttgcaagcccttaggaacgcatttgttattatcattttcaccttaatctcctggggtatcacaagacacaaggccaaagaagacttacctatctctttgttgggaactgttccatctggtttgaagaatgttggtgttatgaaattgcctgatggattggtttctaatttggcttccgaattaccatctgcaattattattttggttcttgaacatattgctatttccaaggcgttcggtagagtgaatggatacaaggtggtaccagaccaagaattaattgctatcggtgtcactaatttaatctctactttctttaacgcataccctgccactggttcattctccagaagtgcgttgaaagctaaatgtaacgttaaaaccccattatccgggatatttactggtgcttgtgttttattgtcgttgtattgcttgactgatgcattttatttcattccaaaggctgctctatctgctattatcattcatgctgtgagtgacttggttgcttcttataaaactacctggaatttctggttgatgaacccgctagatttcgtttgtttcattgttactgtcattattacaattttctcctcaattgaaaatggtatctactttgctgtttgctggtcatgtgcattactactattgaaggttgtgttcccaacaggtcaattcttgggttatgttgaaatttgtcaagttagtaacgctgaagttgatgaaaacatcgatcgcatcgtactctctgaagattctcagcctaagactatcgaagataacgttaccaaaaacaacactgcggtaaaagttggagtcgtagcgaatgagtctttcggccattctcaattacaatatcatactaaatggctaccactgaataaccactatcagcgtgaattaaatccagatgttgtagtacaagcacctcctcctggtgtgattgtatacagaccaagtgaatcatggacatatgttaactgttctagacagtacgataccattttcgacagagtaaaagaactgacaagaccaggaaagcttttgaaacatgtaagcaaacatgataagatgtggaatgatccaggtgagtgggaacctccatttttagtgaaaaagctatttaagttggggaacaaacatgatcttgaaggtggcgaagtaattgatgagagacctgttttgaagatccttgctatggactggtcccaagtgactcagattgattccacgggtgttcaaaacttggtcgacttaagaaaggccattaacaaatatgctaatagacaggtagaattccatttcagtggaatcatctcgccttggatcaagagatctttaatcaatgctggattcggtactgtcaatgaggaattcagcgatgaatcaatcatcgtaggacatacaagttatagtttggtcaagaatagacctgatttgcaagatccagaagcggcgttacctgaaccaatagcacttcataccgctttaggtgtaaacttaccattcttccatttggaaatgccagaatttcataaatggcacctatgaaaggtgtagcattactatttcgcatacttcttcttcttcagtatatatattcatatatacttaactacttctaatttaatttactgagtaatgacgcggtcaggcactacaataaaattgacactatgccatcaactacaatatattgaaatcgcgacggaaatcacgtgtacataactcaaattgtttagtcgatacgacgttccccttatttattcaaagtcacagagaatgaatgttgagaatatttttatgatcaagagcactcacctatggcaacaaaaagcggccggtttcacttctgactaatagaatgcaaaattcagactttgatccgtgggtgttatcagtggattagttactggattaataatacaaagaatcgtataaatggaagacgtagagataaacgaaaaaaggtaaataaattcagtagagacaccatccaacttccattcggaagtatatataggtagcatttccataagtattgtttaagtccaacattgaaacccaattaaaaaaggttcagcaaattcgagaagcaaagactgtagaacatcaagatgtcattgttgaagcaagtaagattaggacgttcagggttgaagatctcacccattctgattggttgtatgagttatggatctaaagattgggctgcatgggttgaagatgacaaggaaaagatcttttctactttgaaatactgttacgatcatgggttacgtacatttgacacggcagacttctacagcaatggattaagtgagaaattggtcggtgaattcttgaagaagtacaacatccgtagagagaccgttgtaatcttgacgaaagtgtacttcccggttgatgaagatctcgaattgagccacagcaatggatttacggaaaacgatcttttggatttgacaaaccaacaaggtttgtctcggaagcatatccttgctggagttactgcaagttgtaaaaggttggatacgtgcattgatgtgttacaaattcacagacttgatcgtgagacaccaatggaggaaatcatgagatcattgaaccatgtcgttgaatcgggacaagttcggtacattggcgcttcaacaatgctagctacggaattcgttgaattgcaatctattgcagaaaggtacggctggcacaagttcatcagttcccagtcctgctacaacttactttacagggaagatgaaagggaacttattccatatttgaagagacatggtgtcggaatgatcccatggtctccaaatgccagaggaattctttgcaggccagtaagccaacaatcgaattctaaacggtatgagaccgatggtagaattaagggcagacaattggatcaattacaacctcaggaaacagaaatcgtcaatagagtggaagacttggccaagaagcatggtgtcagtatggccgtagtatcatcggcatgggtcctagccaaaggtggttatcccattgtcggtctaagttccattgaccgtgtgaaagaaattatctccgctaccgaattgaaactctccgaagaagaaatacagtacttggaacaaccgtacctaccaaaaccgcttatcttgtaaatcatacgtggaatacaatagatagggtaaataagtacatgaatacatgaatagaggtatcacgtagatcaggtgttcactacgctggtatcggtcattttattttagcaccgatagaaatctggaagtccccagtcactatagtgaatactaaaagaaaaaaaaaagaatcatcagactcgagaaaactgcacggctggtcctctgagcgaataagttcccaagaaatgtgcaccagggagtcggacaacagtattgtaaaaatgaagagatgctgctgaatagtagaagcatctaccagcatctacaagtgtctacaagtgccttcaatgtagaatcttatgattatcctaagtacatccgatatactttatacttccgttgtagaaaagaacagagaaccctgaacaaggaatcacgggggaaacaggcacaacatacttgatggttccgtttccgaatgaaagcaaccccccataggaacctgatatccccacctctttagatttttccttaccttttttgtgccttgctcttttctctcgccatttgacacagatgtggtgatactttttttatcgaacatttttttttagtatggaagtggtgttatttactgtcggcatgattaaactggcacagtagggggaacatgtcaatttccatcgaaggtaggtgaaattgctcaatatctttcgatttagtggttcgatagttttgtgggtttccatttggtggacacttgaaacacttggagctatttagtatataagagatggacattcccttgtaaacggacatcttattgtgtcaatttcctattgtgtataagttaaagtgtcataccacacaaaccaaaccaaaacaaggaaattaaccaaaccaaatcaaataatacacaatgttcttcactaaagctctaagatctactgctactattgctatgaaccatgccactcagaccactaccaagactgctgttagatctgggagaagagtcggagaagcttgggctgtcactgaagccagaagattgggaccaaccattctaatgtacggtaccttcatcgtttctgtgttaggctggccattccttgtcagaaaggctgatatggatattggaatccacgggatgaagcaataaatattgtgatgaaagttttcaaaacctcatcagagatacaaatattatattgcattggcagtggctcatatataaacggtttaccaacttcaagatgagctaatatgtcaaccttattatcacctatattcttcgcaattccatgctatccatgaaaatgtacaataagcaaagaaagaaaaaataaattcaagaactacctcaacagttaattccactactttacactatcaaattgcgctacagatatgtaaatacagatatgtaaattaataatgatttaaatgacattcagaaaacctacctcacgttccgtactaaccttctttacagtcttttgtttgctctcaccattttttgatgcgtttttttacaagctgcgtcagtttgcttaggtaatccagaaattggcaattctcgtacaccgcatacttaatgcatgttatgtcgagggtggagaggatgcaggggcagcctcacaaccagagtgagacttattcagaaagactgaaccacataattggctgtcagtattaagtaatattatgtgtcaactttactaagattgggggatatcggtcttctatttgtggatcgtcctttaccccagcactatccctctttgaactgctcgctgcttctcaacgttcttccggctaatagcaagtaccgcagtacatagggatgttatgctttggaatctttaaaatatcttactgtagctttaggggaaattttgggttagggcatggccgatgtatgggttaactcagtgaataagggaggagaagcctcatcatttgcacgaggtggcatgtttttaaaaattaagcaagtgccatcatatatcatctctccaatcttatcactatataagtagttcagttccagctggcgttctttgtttcctttagcagctttacccgacatttcgtaaaaccaattctgacactatcaacaagcttcccagcagagcaatcaattactcatcaaaatgtttattagactactacgagctggaaaagagcacgcaacaacagctagaagagttgtatatgcttcgggacaccatgtcggtgaatcgtggacgaaatcagaaacaaggagattggctccaaatttgatcacttatgcgttgttcattggaacaatggtcacttggccttattgggtcaaagaatattcttatgtaacgcatggtaagccaaactggtcgccataatctgttaagacgaaggctgtatgaatttctcattccttcgtcaaacaaaatactgcatttgctatggtaaaaaccctttaattttccaatactgactctactagtttgctatgttgcatggagttaaaatccgtttgcgttcaatactgatacccttcgcgctcaagactttttttttcctttctcttaaaagtcattatacctctttattagttatctggcacctcatacttagctagctcatctttgttatctatttatactatcaataaaatttaactggcaagcattacttagcggatatcattagtttttattaaaatgaaagcattgatatttaatttatcttattatttttgatgaggttaagttttcaaatatattctttatctactgtggtctagcctttggtccccagtttttggtaggattttcttggtatcttacaatttttagcttccttagcttttcaaacctaccactgtattcattaggttcgaaggatatctttttatcccagtcttcagtttgtccgatggtatcattggtcaaaatcttgtacccgtttccattcttattcatcttctctatattgacaagattgttatctatgcaatacttcttcatcacataccaaatggcatcccagctggcatcggtcttcaaacttgatgcctttgcatgtgtcaaagaacattcaaaccctagcgatcctagtcctgcgacaactgcctttaaagttggcacttggaatttcaagactgaggacaccgagtttggtgtgaaatagaaaggagcagctatctcattcttggctaaagtcaacataccttcgattctctttctcgtaccataaatatcatccttatgttcttctttattaattctcaatacacgatcaatgaattttttgttatgcaatggaccgccgtacattggcccaacgatgtgatggacgctcccgcagtatgaacaattcctatcaactggtggaccttgtgccaaggagaatttggtgaatttgacccccttcttagttgtcctttcttgttgtctgcctagaggctgtgtgtggtaagcattacagccagaacacatatatccgaccatggtattcgactgcaagtttttgacttcaattgggcttgttttgactctaatgaaaactctgacgtagaaatcgatacttaacgaaagaagtggttcaatagtctttttatactttgcagctgattgtcctaaaaggtttaaaactagcctcaatgcactttcatgagtagcatcgtgacctgccatattaacaccactgtacaatgcaaaacatttttcggggtatccgttaccagccaagaccgatagatctgtacatgtaaccagcatcaatccaccatcttcgatggattgcattgatgcatcgacgaaaggagtaacggtaccatatggatccaaatcaattacatggtatttctcatttttgcttttgtttctgtacatcagcacatttgcatcatccaaattgggtacaactttatccgagacctcattatagatgacatttctctttatggattccactgcctctggtagtaaatcgttggctacaatagtcttcacattaggaacctccttagaatatcttatagcacgtagcccggttgcactcaatgcttccaaaattttgatgtacggcctggtagaatgatcttttgaagacacagctacagagtcttgatcttcgtttaatttacgccttttgatagtatcgtaatcggaaccatcttcattgctctctatgggtttccttttcttgttcttgctcttcagttcacggctttcacgttgttcctcttgatacagttcatcccatgctttgatacaagtgacactcaaatctctattgaactgctggattggattatagaacacagtttccttgttaggaaataatatcttagcatcaccctcttgcaccaccttgaactgagaaacatcgatcgttgagctatccaacgttacttttctgccaaattttgacttcaaactttgaaaggcagccctgagcatattgcaagtttaaattcttacttttctttatatggttttgctttccctcctaaaacaaaccagctgaaaacgcttacttggcctttgacacacacctcagcgattatttactaggcctgaggatcaagctatatatcttatcttaagttgatttctgcgagaagagatgtgatgagatgcgatgcccatgactgaaaaaattgaaaagttggaaactaggctgtaaagatgtaaaaagtatgggaatctatgtcacgtgatttaatctttctattgtttatttggcacgtacgattaagtacctcaagacgaaatgcatatggtacacatggttcagtatcgatattaatcgaggatatgatgactagttcgaagcagactattagctgttactacttctatctacttttttttagctttcattactgttctcttggtggaagtaatatcattatgcttatagtgaaatttgtgcgtttgcattaagatttattaccactaatgattcaagaaaataagaaccatcaaatgaaagaattcacaaaactctaagaggcaaacaagcgcgggtatgccaccaaaaggttggagaaaggattctgaaggaaattatcctaatacgtcttatataaaagaacaagaaaagatcagtattgatgatttactatttcctaaaagcataatcacatctctagcgaaggaatcacttcagaacgcgtttcaaaagggcgaagaagagagaagaatcacggttagtaaggatgctgcattggcaatgcagaggtcagcgacagtctttgtcaatcacttattaatgtttgctagaatgaacgcaaaggattctaatagaaagagttgtaatgatcaggatatcatggctgctttagatacgttggggctaggtgctttggagagcatactcacgggaaagatgcaggagtaccaggaagccatactttggaagaagcaaaataaagtcaataatgctgtgcctggtgcggacggagacatagcaatggaagatgatgaagatgatgaagatgacgatggcagagaaggcgcagatgctgacgccgagcctaaatccagagctgatactgaggttcaacaaggtaacgctgaaaatgataaattagatgggcctccagtcaaccaagaacaagtacctagcacgcgccagaacgacctggatttaagcacaaaaaaacagaagacggaatgatcgtataatcgatttgtggagaagaggtggcaagaagtataagtactataaacaattataccgttttcgtgtgctcatgggttacctatacttaaaaaaaatagaactaatgtagtaataataacgacacaatcacaataatcgccagtacaactataatgacaatggaataaaacttaacgttattccaccacatttttctcataatcttagaggatttcctttgaaatttaaaactattttcgttcaattgattagtattatccacaagcagggatatcctttcctgtctctgtaaaaacttatcgatattatcattcattattgcaataatgttttgtagctcttcctcagtggatgcagctgtctgctgtccttccgtgcgataagataataattcttcatggaatttgtccaattgattatcgatattactcttcaaatattcatcgttgtcattattcaaacattttagttctgataataacctcaacggtaggaatttggggacttcttctttaacaaaacaaatgagcactttattgttctctgcagttgtataatagcaatcatacccctctataaggtcgatagacgtctttgtaactttgtttcccggaagattcaccactgttcgtattaccatatcgccgattaacctgtgaaacactgctttttgatcggctctccctttatcagtgcttccatatttactattgttttcgtccttggagtcgtaccagctagaaagaactcgatctccatcccaaacttcaacatatgacacactataccgcttcattgttgtaataattcaccactactaacaggcaattaatcctgagagtcctttcacagtttccttgcaacccttctaccagatgtagctggtaaacatggaaatttgtcagttttcatattttcaacattctccaaaggatatcataacagaatcagaaccgagacaaaatctctacctccggcagaaagaagaaaaaatgtcagctgaagcctacggtatagttgtgataacttaatagtcttctcatttttgattgaagctgctgatacctaattcacttttgaagtacagaattattcatatttatatctatttgacatgtctataaatctatcaaagataatgtcgataatgacatattccaatgacaaatatgtatgcgtaagttcctttgtgatattagtataattgaactatacttaccctcgataacttatggtacaaaggttggaatttgtacgcaggacttagaatcttctggccatttgagatacccactttccaaaagttcatccagagttttggcctttgtaccggtagctttgtaataagcgacatatccttcttttatagcgttgatggctgacctagctctaatctgatctcctttccattcaacaccaaaataaccaccattaccagcatgtctaatctcacgatttaatcgttgagagtattggacgtcccatgggaatgccaaatcatgatacttacttccatcgccacttttctcgatgaaccaatcatggtacttctgttgaagttcctccgatggaagttggattcttcctgaccatactctgctcaaccaagcaccttgggtctcggatagtcttgtaggaagaacaaaccttggtaggccaataataccgaatgttggcaatgatattggaagaatatggttgtacaggttttgtactcgtctaccatcaccaattaagttgttgagaatggaatttccgacaccagattcattctgtggtaaaaatggtagggactttaagtaaccagtacagaaaatcactttttccacattctttaattcggtgccgtcaacgaaggtaatcgattttgttgacggattaaactctctaatatcaggcacatctttaatgaaaggatcgaatggggccggtaatttggattcggatctcttcgacttataaataggcttctgtagttcgttagccaattcaaatgctaagtctgcaccagaagcactgttaccaacaatcaaaatctccccttctacaccatggaaatcttctggacagtcaaaatccttggcatgggaaacggagcatgggtatttcacgttccattcttttaaacctggtcttgaaggaataaatggtagatcataaaatccagtagcaacggcaacggcatcgaacttctcctctgtaatttccttactgagaaggttctgagctttgacagaatattcagctgttgcgtcttcgtaagaaactttcacaatttctgagttgaaagtaacatatttttcaatgggtttggaatatttcataatataatcaagcacttgttctctcacagggaataatggggtgtctgttggaaatctgtgacctttgtactccatcaatgtcttaggaacattggtatctagatatttataaactgctgtttggaacacatgtgtttcttcagggtgtggttgaggttgaattctaatgtgagggtattcacaaggaacagacggcgacgatgtgacattagagtccttcagtaaaggttttgtatagttccatagaccaccaaaattggatctcttctcaaaaactttgacagattcgaaatgtttctcattcagcaaggcttttgttaaacctgatccaactggaccagctccgatgactgcaacgcggcgaattttatcaggattcacttttattaatctaatttgagtaggtctcattttttatagtgattgcgcgccctcgtaacagactttcgtaaatccagtgttaatctttggaaggttgacaatttctcagctgcctggtcagaaattgtatttaattggcttgtagcctatgtattgtaagtgccactttttttaaaactggatactgcgatctgaaaggatgagtttggcagttaattataatgttaggaaactttcgaaatctgtctccgatatatcgatataggggagttccttgattgaagctgctagatttatctcatcccaatctcttgttatatacgtttatgctctttagaccatcatgttttttcattcgatgaacggactttggctgaatcaagtagtttaaaaatccgttgtggctttatcacgtgactaaaatcactgcatatagacaccgtgaaccaactcactgctagaactgtgtggggtgtgtgttgaagctttagaagatggtgttatctgatcaatatctagatgagatcttagagatactgtagttatcatgtgatggtttttgtggacatgagggacctactgtgtcttattaatccataaaagatcgtaagttcctaatacattgggtactaaagtcatagcatcattattaattgataagttgctcgagtacatctcgaataggaaagtgaagtggtgggaagaataaatatctatgtctatatctatatatgcatatatggttgtataatggtatcggtgataggaaggtaaatgcttttttttgttgttttttttttgtttatctatgttgcatattatcagctcgagttcatgcaaatctacagtcacaccaacctttcaccacgtattgaatctccttggaattagcgttttttccaagggaaattctgccacatggtttgaacatagttggttgtgacatttctggttgtgaccaaggtttcacctcggagttcaatctcacgagtgacgtagtttcctttgtattttcatcttcttcgatatctgatgaagaagaatcacgtacagttgttgccttgacgaatttcaagtttgctggtgcatgctcaccgtgaagatctgtcctcgtaacctggcacatgtctgaccaaagcttctttcttgttattagtgctaatttgatttgatgtggtgatatcctgttggatggatctgctggaatgttcaactgagaaatttcttggattgaaagccgttgtagaatggactcatctaagttgaggtcaggcaataaatttttctgtttcatactagtttctaatgcatacagtcgtaaaaaggatggatttagcgtctgttggcgagttctcttttgcgttatgggatccaatgtgatggattccatgctattagtttgtagatgctgttgctgtgaagagttgggccagtgctccatctctacaacttgttcttgtaaaaagatcggtttgaatttcctgtgacgtttatgctcttgttctgagctttcatctgatgtattggtaaatattggatcgatatccatgcgtttgtttttgggtctttcgtagattggtgtaattggttgtagaatgtccttctctgaaaaagattctgtgaaatccaaatcgttcaaattatacatcttagtatgaggcaaaacttcatatccagtgctctgagggtcacttatcttctgcacgcgtcgttgcgatgtttccgtatcgctgtcgacatggctcaatggatggttccggtcagttactccatatagtgttttgtcatctttagaacctacatctgaaaacacattatctgcactcgtaccatagggactcgaatttgatgataatatgctccgtagcgaatccgttgaagatacggtggatcctgtatttctgcggtctttgcttcttttctttatctgacaaagaacacttgacaaagaaggggttagagatgatgcatcgggtgtagacgaaggagacaccgaaactggactagagaaggttctctggtttgaattaacctcatattcattgacattacccagcgccttgagatcttgtttcagcttgtgccttgaatattttgtcgtcggttcaaatattctagccttagattttatatgattcaatataggcattgggccaggattcgtcatcgtgttcagtactaacagccccatactctttactttctctaattgataagttttctttccgctgcctgctgcttgttttgatgacctctgctctaatccttcaaatacaaacacggaactgatttataaggttttagttatgtagccttttgtagcattaacctggtaggtgatgatatacgcgtcctggacagtaattaggatcccgtttacaccttcttatgttatatatccatcgtttcatataaataagcactctctaattatggaagatgccttcgggcaattgatgacggatggcagcttgactgaaaaagaaatcgctgttgtcagctttttcgggaatttaatgactttttaggaaagaccgcaattgttgaccggaaaagggatttgcagtcatgtgattgaaaatctcaaacggaatgtgcatcgcgattatagattgtaaatatatatatatatgtatatgctaatattacattttgcggcttactattgggatgcttgctgtatttgccatgaagccggttgaggtttgtgctgatctggtgtttgttgcgtagttggcgacgtactggaagttactgggggttgatttggtgtagtcgagggtgaggcagttgaaggtgattttgtcaactccagttgccttttcttctcttccttgattctgcgacgtttttccttttcctctgccttctttctttcattggttcttattagtttcacatcggcagcaaaattttgtcttagttcagattccatctcatgtaaacatcttgacgagataaagggttccatgacatcgaaaggtttcctctccgtaggcctattctcgatgtaagatgccttgccgttaaccgattcgtcccttctcgaagatcttctacgaaggttctcgtcatacatcgttacccctccaagttctctgggtgttaacatgtggtcatgtccatgtgaaaggatggctattactgatgggtcctgctcctcccaaagttcccatatatggcttttttcacaacatactatcttttggtccttcactttcttgaaatcgttaataccgtgttttccactcttgcaatccaaataccaatcctgagaatcgacttgatagttgttcgttggaataccaaatttggacagactgtcaagatcctgttgtgtgatacaaacgtctgctggtaactctaatgtctccacgtctttgtaactatacgcactttcgtcgactggaataatccattgtttaaaacttctaccatacccaagcacatatgagtcgacttcttgtagaaactgctcgccatctatatctattgtgtcatccatgtttttcctctttagtctctcttgtctaaaatctttatcaaacttttcccatagtaaagaccataggtaatcctttaatttcttcgtacgtcttgttaagattctgttgcgatggcgtaagaattgttctctgcggtcaagcttgtcataccatttcgtttccgtctccttcttttgatgtccttcatcgcgggccactattctggaagatctctttcttctgaccattagagcttgcatagactgttgtttcaatctgttagcatacaatttacgtccgtaaacctctgcctctgcatggtattctattaagccttggaaaaattcttgaaaatcaatatcatctatcgtttgtagatattcgacgaagcttctataatcatgtgctaacgtttcataatcgatcttgacatcatttaaataggcgtcgatctcatcggaataatccaaatgaattacgtctatagtggcttctgtctcttcgacaagaacacaattctgtaactttataggtatgttcaatccgtttgattctggtttgaccgatacctgtttccttataatctttccagtgggtaagaccaccaaagaggtagcatcattctcccaaatctcagggaattggaagctatccaaatggttttgtaaatagttcctaaaaccaatgttctttctttctaccaatttaatgacatggaaaatgatctcgaactgttttaatatgttgagatccgcgaatttgctattgatatcctctgtgtaccaaagtagagatttgtttaatttcgaattaaaaatgtggtacttcactatttcatcccaatgtttcaaggataccgtcttatcctgttctaaagacctgatcaacctcaacaagatactcttgaataaattcagtatatgaccctcttcgtcctgatccgtgctgcccccatttggatcctccgattgaaccaaatccaacgaatcattttcgagactccatcccgcattataatctaagagcattattctttcatcaaacgtgatttcagtccaccaaggtttccccgtagtgaaacctagcgtccagtaaccagtacaaacgttatggaaccacatcacactgtactgataataccaggactggatcaattcctgcaacggtacaaaatccaacgcgattgggggcaacttatttaactggttcaagattgttcggtcgatatagtcatcccatttcacagccgttgtttcgtaatctgattctacgtcaccattgggaagggccgtctcttcagctttcgtctcgactttcgtactgatctcctgctcttgctttgcctcttgctctggctctggctctgccctgcgtctaagtctactacttctcttcatactagacactatatattttttcttttgaattccctttctgcagttgatttatagatcgtgtcgtatcgtattgaatcgtattgtttccctattctcacagtttttggtttcgatacacgactttcacctgcaattccaattcctcaattagaacactccagactactcccttttccacttgtacgaggatataaagattaaacttaaactcaatataaattctctacgttctaaaatcactactttgaaatcaacatcttaaacctgatatataatgtatgaagcttaaaggctgtttgcattttgaagcacaattcgaaatttgaaaatttgaaaaaaaaaaaaaatcgcgaaaccaaatataagtccgggtaatcgagttatctgccaatctttcattttcatttttaagttctcgcgcgttctttgctgtacttgacagttgacaatgcataatttacttgacatttacgtgaatagaggaggcttaaatgaatctttgacactgtatagatctataaacatcacttaacacttgtgctgaaagttctttgtgtatgccgtttacttccgctactcatgtcatctggcccgccgtcttatgagttaaatacacttttctgtggtcgtattatccccaatacacccacacatcacatactatactgcaggttttcttactctcttcgcctcgccctttttgcctccccttcttgtacgtaatattagaagcaaagatctcttccatctcggtgggaatttattacgaattaatacaggggaacaaaaaaacaaaaaattaaaagatatgattaaagaatactttagtacaagtaaacaaagcctggcctggtgaagatagcatcgttttgtccctgcttgtgagacattaatcgagcttgaagttaaagaatccattccattctttgtcggagttgacgttaggaaagcaagaaagaagtacagtgttttctactctcttttatttttttggtccatttcatatctctctctttctcttgttttctgggttgtcattggcctttggattgaattggggagtgacgaaacgatatttagaaccaatcttgaattgattactttcacagtacactagaagttgttttccccctttttctagggtttgttttattggtgccaattattttactttggtttcgtttaactcatagtttatatccacgatgccttcagctcaagattaccacgtaaatcctcatttccatatgggcgacagggagggtgaacatcagcagccgccaatggcacctgctacgcctcgtatgatgggtcgtcgagtctcagagagcagtgctccgggactcatgcccgctgctaacattgtgaatgataccacgcaacaaccgcagcagcaaccgcaactgcagactgtaccacagtctgtcccagtaccagcgcagagtttcaacgatgtggttagtaataaaccgttccataggaaatctttaggtgactgggattttttggaaacagtaggggcgggctcgatgggtaaagtgaagttggccaagcatagattaactaatgaggtatgcgccattaaaattgttaatagagctgcaaaatcgtatatgcataaacaaaatcaactacctccgccgaaaacagaagaagagttgatggaaagaaagaagaaacttgaaaaagaactttcaagggatagaagaacaattagagaagcatctttgggtcaaatcctataccacccacatatctgtcgtttatttgaaatgtgtaccatgagcaaccatttctacatgcttttcgagtatgtgtccggtggtcaacttttagattatatcattcaacatggttctttgagagaacgtcacgcgagaaaatttgttcgtggcattgcaagtgcattgcaatatttgcatctgaataatattgtgcatagagacttaaagatcgagaatattatgatctccaccagtggagaaattaagattatcgactttggattatctaacctttacgataacaagaaacagttacatacattttgcgggtcactctatttcgcagcaccagaactactaaaggcaaacccttacattggacccgaggttgatatttggtccttcggtgtggtgatatacgtattggtatgtggtaaagttccattcgatgacgaaaacgctagtgttttacacgagaagattaagaagggcaaagttgaatatccacaacatctttccattgaatgtatatcgttactttcaaagatgttggttgtagatccattgaaaagagcttctttgaaacaagtttgtaaccatcaatggatgcaaagagggtttgatttcccacccccttcgtatattccacatagagttcctttaacagttgaaatgcttgatgttaacgtaatcaaagaaatgcatcgtctagagttggttaatgatgttaacgatgctttacaggctctgcgtgacattattgactcacatgaatataaagaactgtcaagagaatattggtataacgtccaaaattccaataaccaggaagatggaaccagagcattccatcctttgctttctatttattatctagtcgacgaaatgctaaagaggaagctggccaaaagactacagaaacaacaacagctacaacaacagcaacagcaacaattacaggctggttatcaatccaaaccatttcaaggtcaatcgcagcccatatttccatctgaccaagtggacacttcaataccattacctgatcaatcgcagccaaaaactctacaacaacctgtgtctgttaacaatagtgattatattgttcgaccatcaagtatcaaggaagtatctccagaacataccacttctccggcagcgtacattccatccaatttagaaagaaattcgacagtagttgcctcaccagttaggaacaaagagctaccacagattatgatccctccaaaacttgccattccagagctagcgcatacttctcctactcgaaaatcaagcgatgcaaaccccgaactggacgcagtaatgtcaccatcgcctgccccaatggattatccatcccaacaagagcaaaccaaacaacaacaggctaacaagtacaacatgggctcggtaaaaacaagcactacaagcagtgagaagccaaagataggttctattttccgtagactttcacagcgccatcgccatgctcagaccataaaccagggctcgttacaagtgcaggagccgaaatcagtggcgttacaaacaaatgctgcgccaaaggtaaggaaaacgcatactcgtacagtatcagaacatgtaccgtctacatctcgttacgcagacccgtattactctgaaaatgctcctagagatatgcaaggggacttgccggcactaccagctaatgcagacgtattggtgaaacaacaacaagaaaggttgaatgacttgaagttgaataatgaattagatgatgaatctgagactcaatccactaaatatgacgaaaaccaaccacttgctcttttgtctctgcctaaaggaaagaaactccatccaagtgcaagggctaagtctgtggggcatgcacgtcgtgagtcattaaagtataatcgtcctcctgtattaacaacttctgctgccaatacttccagcgatggttcaactgcaccaggtcgtattaatactaacgatgatggcttcctgcaatcaagctcagaaggcaacgcactccagatagacgacatatcaccctgggaagaactaactgatgaacaaattattgaaagagcatccaaagctcctccaggttcaatgccatcgatcgacttcccacgttctttattcctaaaaggctttttctctgtccaaacaacatcttctaaaccattacctgtcgttagatacaagattattagtacgttgaaaaagttaaacatcgaatttacagaagtaaaaggcggttttatctgctgtcacagacaatcttacgtatctcaagagcagcctccaaaccacggtaggcatccttctattgttattaatgaaacttcttcattggaatcaaacagctcaacagcaaactcccatagaaaacaattgtcaataccatcacgtcatggttccattagaagacatggttcactcaaacaaccaggaatcccagccacacctctggctgctgcaacgcatgaacgaaatctgtctgtcacttcgccacgtactagtactgggcaaatcctagaggaagtttctactgcatccttcgaaactctgaataatcaagaggacatattgactaattcaaaggcacaagatatgaataaagttgttatcggcaataagaatgaagcaggtaataaagaaaggccacctttgaagtttgagatacatatcgttaaggtcaagcttgttggcttggctggtgtccatttcaagaaagtttctggtaatacatggatgtataaggaattggctacacatattttgaaggaattaaatttatagattaaaactgtatacacactatgtatgccataatcatttcctaatgcaagtctagtttataatgttacatgccacttttgtctcattatgtcattacatttttctctatgcaataactacgtgaggaaaccaaacgactattctaagaaactcatttacaaagttgttcaagctcctcattcgccagtaaaagcagctggatgtcctggacgatataatttaacagtgtatgtttcgtgattcttttcccttccttcttcgggagtttgtagtcaagggagatgatttcttttgatttcggcagattcttatgaacttcagtccaaactggtcgtggatatcgtatcatcccgatcaactcatcgtattctcttttgaaagtgtttcttctttgtttctctaaatagacatgtttccaccttcgcagctctgcagcatcgcttgagatatcttcaggaatgacgtgttcaggaacttcaacgataggaattttgggatcaattggcttgtactgttcatatgattcgaatattggaagaatcatgggttctatcgtagtagatttacctttactaccattgtcattttttagaatatccttggaatttacattattgtttttttcttcatgagatggggatgccgcaatggcaatctttgtgtccagcctttctccctgcttagtggttgacttatcctggaaatgtctggatattgtggtttgtagttcagtatggtcgaaaatataggtatgaggatcagctcccaaatgttccgcatttcgcataaaattttgagccagtttcggagagaaaagggcggcattagaagcctttgacggtgaggtagttaataaactatccaaaaagtgctcaattgcatgcgactcgttcacactcaacaaaccttcgttatgtgagtttccagagtgttcaccaaacgccccgaaaggtgatgaaatgtggtttcggggagtctgcggtctgctactaggaacagaatgggtgatttgtgatgcagctggctttgtgtctttttcttcttggaaagctctatctctattgactactttgtcaacttcctcatcagtattagtatgctgatcccctcctgtcgaagcattctctggaacaacagtcatatggttgaagaactgagaatcatctacaagattcatatgaaattgatcgtttgaatcatcccatagttccgctttctcattaattaactcataggcagtctcgaaatctaaaccttccaaatccatgtccaacagagaaccgaggccaccttggctttgagcttccattgtattttcagaaaatcggttaagatctgtattgctactgaacactccacgcgaatagttaaatgtctaaatgtttgcctgcgtccaaaatacccttttataattagatgggtactttataaatctatcaaacgcaacaaatctaggtatacttgtacctcgaatctccatgcactcatatatcaaactccgcagatctaatagtccagctaatagtcaacgctgtaataactcgatatagcaacttatatcactcaatggctatatgtttttctgcaacgcacctccaataattcattcacattacattgttggaccttactataaactaagatgtactctgtgatgttttccggtaatcgagcttttcgtcagtttctattgaaatccggacgctctggacattttcacatggagaggatttaaagtcacgtgtaagaagatatcacgtgaacgggcttttctcgtatatcgtctatcacttagcatcgcgcgagctacaagtatccactcattagtcgtgatggaagtacagctctctggctgttatagtaatcaaatatgacagccctgatctagcagtcacggtatgacttcgccttcgagaaatgaaatggtttttctttgctcaatgagaactgcattgttgtgccgtcttgcctcgttgcagaagaagcaatccatttcaacttgctgaacttcttgtgacctctgtttgagattttcaagatctcgttaaattcaagcccatcttttcttctattcctcttgattgtcaactgatcaaggccgtcgtctaatgacagggaccacgaacatatatctgagtcttttctttcagaacatctttctaaagagaaaccaggtaccactatatttggttcgtcagtagtcaataatctaatgcatcttccatctggatagaatctgaagtacctgtaataagtgatcatgtggattgggttcaacagcgaagatgatccttccgggatcgatccgtgcctcaaataattcaccacactgatatatattccatggaacttgatatacggccgttcctttagcatctttctataattttgaccccatacggtttctgctagtgcttgtatatctgatataccgtttagcctcatctcattttcgttgtatacttgcttcttatagatgtattccgcgaaagtccggtacggtgaggaatcgtggaagcatagcaaattaaactttttacaagtcaaagataggttcatccacgagtctgctgagcttaacacaaccatgtctataatcatggataatatatcgtcagggagcatatccaaaatccagcagggaagttcaacaaggtcttcagtttgagaaagtccttcagtttcctcttttctgccgtccggatcagtttccgatgaaccatcaacaatattgacattagaattgagcttaagctttttcatctcttcatttaaccgccattcatcatgcatcttctttctatatagtttctcaacgtccggattcatccttaatgctttacggtaatatttgatcgcgtcggtcatagcaccggcagtttccttcgaatagcccaactcccatagtgctatagcttcaatcggttcctccattacgcgttgttatttttcgtgcgttaggccccttggtaatgagtatgcttcctctctcttttaccttatatagccgactagctttttatgctgtttacgttttgttcagctttacgcaacaggaacgaatataaagttactaccgagagatggacaagtacgcacaatgttgaaaaatatgaagtggattccttgtcagtagctgccatcctcagcaaatcggatttcttgattcttatctgactaaaaagtaatattaagtacatggcatatttaatatatgaagagctatataacttcaaagttcattaatatgtgaatatcacaagaaacacagtcgataaatcataaatagccagtccttcaagatctggtgcatcaatgaaaagcaggaactaaaacaaagtgcaaagtgtgtagtgctgtatagatgctgcttatttcattgttatgtcaccaccgattaatttatcgatttcattcaataaagtaaaatcaaaattatattcaaaggcaaattcattaccattagataaacttcccaagagtgcagtgttttcaagtccagtattagcatttatattgctactttttgacattttcatttcattatcgtaaaatttcttggctagctcgtagttcaatgacggagatcctagaaattccaagaatatcgaaagattgtccttcttaattgaaccagtttttatgcactgaattgcaagaatcgaagaatacagcatataaatgttacttttctggaatgttttgaattttctcataaacgatcttaataaaaagtacaactcttcaattgcgttttctatcgcctgtttactctcaggaagtgaatcaataaacggtttgttgtaggacaaaaggataacaaaataatgataccatacatgagccaaaataggattgtaatcgaagttgattagcgttgccttagtgagagcaaactcatcaggtagattcttacgccagtttgaaacttcactgttgaattttgttagatattcccttctttccgttaaagaaccggcatgtatgaatatcttcggggcgaaaacctcagttattcttgatagcacaataatcttttttaaaggtttggcaatagaagttacaattgtaggatcgtattggtaatcttcgataccagtatcaatatttggtagctcatcagtttctggaattgtcgaatttgacacacgcaaagaatttgaacgaccaaacaatactgcaatcaagtgatcggcaatgtaacagccccagtatattctacttctcacctcgatatcgatctgtgacaatttgtcgtcgtagacgtcatcccaagcttcggggttcaaatgtaagccaatctcatgagccattctaaaggctaaccccgattcataccatgctaatggattctcgccatttccaatatcatagaaggcaaggcataaaagtgtttggatgatacccaatttagaagatgatgaataactcgcagtagatccatctagctggaagattttatttaatacttttgttttagccagtgtgtaatattcttgagatttcttgtacagttcttcgttcttatcggcaagcttacttcctaaagcagcaattgcaaacaccaattctttagaacagtagtatgcttttgtagaaggctcaccgaaaagggcgcttagaaaggtttctctatgaatgaaagtataatggccaggatataaccatttgaaaaacaacgataaagcaggtagtatcactggcgacctggacaatgttcggagattagaggtagtcatatctcgattgacatcgttggaaaatatttttgtgatggctagagaatcgttagaatagatactggatgaaaccacttggttatttttggtcaatgtactttgcatatttggtgatgaaggagtaggcgatctaatctcagcaaggaagggcttccatgatgggtttcttggtggaagtgtatttgatggcgtcccttctaacgtttcgctcttcatcttctcgatgctcctcttcaaatcatcaatctctgcctcaagtttctctacgtattcatgagttgttcttttagtccgtttatcattgttgacagtgatacattcgatcccatatttcaagcaattggaacatggtctctccatgtcacacttcctcctctttattctgcaattctgacatgctaggtgagctttcctcttcctttttccatcagttatcgttgacattgaataaacgcagctatgttgttgacggtggtaatgtttattgtagttccgaaaaaggtgccctatatcaaaaggtacgacggttgcgcttcctttcaatcctgtagaagtaatgccatttatttgggtgaccgattccttatgatacactttggtaaacttatgtcttatacatcattactctttcatatctccaaattggccaaagatatttcttatttgacactcaattcctttcttctgttgatgttgggagatgttcgaaaggaaactgacgctggggaggacagttttgtatcaaactgtacatcagtagatgtgtacctagtatgataagtagaaatggttgttattgtatatgtacatgattacaactatgctataagacaggagggggtgggaacgagcttgaaggtgatatatgcacaatgaatgattacagattttaatcccttagaaagtcgaccaatttggagttgaactctgatgggttatccaaaaccaaattgtgaccagctctactcacgatatcgaaagttccatcgtagctttttcttatactattgaactcctctatcgccagccttccagcgactttattcatccaatcgtgttcaccataaaccaacatcaattttgacactttaactttatccaaagaatccatgatcggatcatatgctaacaggcttcttgagaatagttggttgaatattctgatagaggtatcagtcataattcccttaccgaaaaccaattgaaacacgtactccctgtaagggacgcttggaactctaccataagagctattcacataaccccaacaagctttggctcccaggggacccatccatcttagagctttattttggtattgtaagataagttttggtatatttcttttattcgagtagttcgatttgctagggtcttcggattgtatttcataatctctttccggttccaaatggttatggatagaaaatatgcttctttccacaccaagtggtgacacaagacatagtttatggacgttatctgggtatttcaaagagtatttgaaagttagatagccaccgtacgagtggccaaccaaattaatcttggacaatttgttttcctttctccatttttccaaggcatcgacgtaatagtcctcataatgagccaaatgtttcttatatttctcttcatcaaccggattctgcaaacggaaatactgacccttcacagtttcgttgaactctactctgtcaggtttttgcatagagtctactgagagaggtaactctttcgacaacccgttcccgggcaaatctacagcgtagacatctttcaaggacaacgaaagctgctcgaaattcctgaaaaatgtcattgacgatgcagcatacccatggatcatcaaagtaggtacccccactgcttttgccgtaggattcgagatccgccattggttgatctcgcccaatagcatcgaattttcgacagatatcccggaatcaaactgcaattggtccataagattctgttgcaaatgcttcaaactaccctttgcatcgtaatttaaactattccaccactgtttccagccagaacgcttcaaagagagctcgtctggttgcgacattcctttcctcaacagcctcaatgccaagcttctgcgaactgtcatatacttctcatatacttcccctcgaatgtttcaccactgaagtctattcaaaaacgtaaactgtcacaaatgtctgaacttatatggcaagcaagaaaccttcaaagttgccggataaaccaccccgtgaacagctaacggtgctactgtgtttacctgaggcataagtgcatacattcagtacgtaaacttttaaagcttcacggacatttgtcagcttaaagcctcgagagatataaagatacccgatggaaatacgatggttgatattttgaaaagaaatcaaaaatcaacatacgcacatgcacacacgtacacactcatcccgaggagaagaggtgggattcgtgtcgtcctgggctatgagttttaaggtattcagtgagaatacaaagtagtgaagaatactagtaggtctctacggttattttaaaattaatctaatttattataaaccgtaatatgagtgaacttttggctgaagaattggtccatgaagacggaagatcggtcgatagccgacaggatttaggtacgccaatggcatctgatttgttgtccacatcggcatcaaatgatattaatggagacagtagcaaccagggctctgctagcgagtatgatagtgaagaggagtacgattcagatgtaattgatgagtatgagagacagctttccgatgctcagcgagaatgggaacgttctttagaacagctatggcaggcggtgacgtggattatactaccgctagcggggaaacttctcggcagaagaaccgcaggcataatatggaggaaggtgatgaaccatttatactcttgaattcaatggcattaaagagtttggcaggcgatttctctcttcatccaggtgacgaatgaatgaattcacgatcaagaaaataatttaaaataataactacggcatatatcaatttacatacactatgaacctttcgtcattttccagctgcgacattgattatgatgatgatgatgagggtgatgatgaacctcttgaaaaattaagcaagccctgacagtacggtttgatgaaactttcatctatgagtctctcaattgactccaaaataggaactcctatcattctagtctcacttttggtcatcactccgcagactcgtattagcagatcaatgagtgctgctgttaatgcgtgtgggtctagtattgatttcgaacgcccgctcttggtgaatattatctttagtctctcgtttagttgatataatagtttctcgttcactttatccgacccagttagattgttcatatcatatattattttaagtttctctaagctgaattgtaccacttcacatttcatattgtatcgcctcatttgagggatcgatagttcgaaactgttgaagagccattgttctccattacaaactcgcagtaaatgttgtaagagttcaattctctgagtacatctttcagacaccattatgtttctagcaatttgtagtctgtcgctgtggctctctgttgataactctcctatgtttttccattcgatattgattcatcctcaatgtttctcaatgcaggataatcgtgatattcattttaacaatttgattcattgaaaacaatgtctttgaggaagacgcatagaagcataaataggtactggagattctagtaaagtataattgccaaatcacagtcatctgtgagatacttatcccccggataatattggtgttccgagaatctgttgattatttggagctttatcttactaattgcagcttagagcttatttaaactaacaatctgagcgcttcattatacgcctaatgctggaccaaagtggctaactgaaattgtaataaaactgctcttgtcaaatattagagccactgcattaacaggtttttgacaccatctctgatgttcctgctatttttgttgtttgtggtgagccaggttggcttactagtattctcaccgaaatttaaggatttgatcttgtttcgatggtactaccagcacatctactacccattatttactgactacactcgttatagatggaagtactggttggttcctgggttctatgcctgcatcttgatattctgtgtccatcttttctacaacaagttaaacgacacagtcaatccatatctatattcccttgagaaagcgtttatcccaattaccattgcatttacatcattgacaggagtagcctccgtctttgttaaacctctcgggcttcaggcgggccctcaatttcagcctgattacatcatattccatccctctgcggtttgtcaaacgtgtaaaaccatcaaggtaccgagatccaaacattgcccaatttgtgagcgatgcattccattacatgatcaccattgcatatggatcaataattgtgttgggtatggcaattatgagtacttctactcgtttctattgtcaaattgtttgttattaacctacgcctctctaagattgttaacactcttcagaataactgcattcaagaaagacaaatttttcctatccttattcttattgaccactgcattctccctaattgccattgtattcacctactatcaattgaagttggtaaacgacggaatgaccaacaacgagcaggacaaatggtatctagtacaagaatacatgaggaatgggaatcttgtgaaggacatggatggtgtcctgtattacagatcgatgagcactgatgcacaaacagcagaaccgattttttactcgactaatttgtacgaccattccaaatatcatctcataaacccagctaagatcctcagtcatgaagaaataatcaatctttatgacagagggagttttttggataatttgaaggaaaggattcatctcctcgattgaatgaatgaaacaaggtgatcagaataaacaagaaattatttaataccattattactgcgtcctttatacattgtcacttctgtaaatatcaagtaataaagacaaaaaagggaaaaatcattgaatgtagcaacaaagcattcaagtatcacaatttctcctaaattagttgctgaatccaaccaactatcagcaggatgcatatggcatgttgttccctcatttcgcatctccagctcttccatttcacagcgtttttttcgtcagatgactcaaagaaattcgaattgaaaaatttcaacatcaaaggtatgctttggccagtgctaaagaacaggtatcgttggaaagtttaacaattaatatccactgattacctactatcaacattagttgaatcagagaaattcttggtacttgcagatttgtttgaattgcaccaaaacactcgcacagtcccttgctaggtttttgtgtgtttattgttaactggaaggaaacaatgagcgttgaacttgcaaaagtctccatcttggggaaagagtgcgtccacgttggttatcagattcatgagcacattgtgaagtccactttggaacattgtaagtcttctacatatgtgattattaatgatacaaatgtatccaaggttccatactatcatgatttggttagtttgttcgagaaatccctaccggaaggttctcgtttacttagatacgacgtgaagccaggtgaagctcacaagagccgtgaaacgaaggctgacatcgaagactatttattacttgaagggtgtacccgtgacactgttatcattgccgttggtggtggtgtgattggtgatatgatcggttttgttgcgtccacatttatgagaggtgttcgtgtcattcaagttccaacatcgttgttagctatggttgattcatccatcggtggtaagacagctgtggatactccgcttggtaagaactttgttggcgccttttggcaaccgcaattcgttttcgtagacatcaaatggttggaaactctccctcaaagagaatttatcaatggtatcgctgaagttatcaagacagcttgtatctggaatggtgaagagtttgcaagattggaggctaatgcagaaacgttcttgtctgtggtgaataactcacaaacagtatcggtgttcagtccacaccataatgaaactgtagaactcacttacaccaatattgaatcaatgcttgaacatacctacaaattggtgttagaatctattaaggttaaagctcatgtggtttcgagtgatgaaagagagtcaggattgagaaatttactaaatttcggtcacaccattggtcatgcttacgaagcgatcttaacaccccaagctttgcacggtgaatgtgtgtcaataggtatggtcaaggaggcagaactttcacgttatatgaatatactatctgcgacacaagttgcccgtatggtaaaaattctagctgcctacggtttgcccatcagtgttaatgagaaatggtttaaagagttaactttgaataaaaagacacctttggacgttttattgaagaagatgagtatcgacaaaaagaatgatggttcaaaaaagaaggttgtcatcctagaaaaaattggtaaatgttatggaacatccgctcacgtagtttcagatgaagatttgagatttgttttgtcagatgaaaccttggttcatccattcaataacatcccagaaggacaaaataaggtaatcacaccaccaggttctaaatctatttcaaaccgtgctctaattctcgcagcattaggtaaaggtacgtgtaagatcaagaacttgttgcattctgatgataccaaacatatgttaaatgcagttcaacagttgaagggggctactatctcttgggaagatgatggtgaaacagtagtagtccacggccaaggtggttccacgttaaccgccccttctgaagcattatacttaggtaatgcgggtactgcttcaaggttcttgactactgttgctgcattggccaagaaagatggtaagaatgaccatgtcatattaactggtaatgcaagaatgcaggaaagaccaatcggacctctagtcgactctctccgttccaacggtctaaaaatcgattacttgaacagacaaggatctttacctttgaaaataaacacagaaaccaatttcaaaggtggaaaaattgagttggctgccactgtctcctctcaatatgtctcttcgatcttaatgtgtgctccatacgcagaagagccagttacgttatccctcattggtggtaagccaatctcacaactttatgtcgatatgactatcaagatgatggatgctttcggtattaaagtcactacgtctactacagagcctttcacctatcacattccgaagggaaattacatcaatccagcagagtataccatcgagtcagatgcttcttctgctacctacccattatcatttgctgctatcactggaaccacggtgactgttccaaatattggatcggcctctttgcaaggtgatgccaggtttgcagttgatgttttgagaccaatgggatgtgaggttactcagactgcaacctcaactaccgtgactggtccaccaagaggtcagttaaaacctttaaagcacgtggatatggagccgatgactgatgcatttttgacggcatcagtggttgctgccatttgtaataacggtaccacaaacactactaccattgaaggtattgccaatcaaagagtcaaggaatgtaacagaatcgaagccatggttacacaattagcaaaattcggtgtgagggctaatgaattacctgatggtattcaaattcatggtgttaattctatctcggaattgagacaaccatctgatgcaggaattgagacttacgacgaccatcgagtagctatgtcattctcactgttggctggtatggttaattctgataagaaggatgatgaatcatctgttagaattttggagagacaatgtaccggtaaaacatggcctggttggtgggatgtcctacattctcaattgggtgcaagacttgacggcgctgaaccttcaacaacaaaatcatctgaagttaaaaaaagtgtagtcattataggaatgagagcggctggtaaaagtactgtcagcaagtggtgtgctgagtccttgggttacaggcttcttgatttagatgaggaatttgaaagacagtacggcaaaggtactgtgaaagactttgtagcagaatctggatgggatgagttcagaaaggaagaaactaggatattccaggaagcggtagacaaatacggtgacaagggctatgtgttatcttctggcggtggaattgttgaaagatcagaatcaagacaggctttgaagaggtttgccgaaagcggcggtatcgtcctacatcttcaccgtgatatcgaagagacaatcgttttcctaaagagcgacccaactagaccagcttacattgaagaaattcgcgatgtgtgggaaagaagagaaaagtggtaccatgaatgttcgaactttaccttctttgcggctcattgctccaatgaaattgaattcaggaatttaagacatgtgttcagcaacttcattcgtcgtgtacttggcgctgaaaagattcctgtaccttccaggagatcagctttcgtctgtttgactttcgaagacctatcggatcatttgtcaaaattggatgaaataacctatggttgtgaagcagtagaactaagagttgatcatttatcatccttttcttcagactttgtcaccaaacaaatctccttgttaagagctgcaaccaaatcgctacctattgttttcactgtgagaacagttagccaaggagggaaattccaagatgatgattatgatttacttgaatcattgttgaaggtcgctctgaagaacgctgttgaatacatcgatttagagttgacattgcctaacaacatactctacaatgttttgaacaagaaatcaaacacaaagattattggctcccatcatgattttgcagctaaattcccatgggatgatgctgaatgggaaaatagatataaccaagctctttctttagacgtggacattgtgaagttcgttggcacagcagtaagcttcgatgacaatttggctttggaaaaattcaggtccactcatactttgaagccactaattgctatcaatatgactgaaacaggtaagctatccagggtgctaaataatattttgacacctgttacctccaagttactaccatccgccgctgcccctggtcaattgacactagctgaaatcaaccaattgtatcaccaaatcggtggattaccagccaagaagttctttgttattggttctccaattggacattccagatctccgatcttgcacaacactgggtatgagctactaggcttacctcatcattttgataaattcgaaactgaagatatcgaagtagttaagaaagaacttttgaccagagaagatctcggtggcttagctgtaaccatcccattaaaactagatattattgatagtatgtttgaattgagcgaagccgcaaagaccattggcgctgtaaacactgttattcctttaggaaagaacaaattcaggggtgacaatactgattggttaggtatcaaaaactctttggtttcaaatggtgttcctagttctgttagtggttctgcaggtctgattatcggtgctggtggtacttcaagagctgctatatacgctttgaaacaaattggttgtgacaccatttatatgctcaacagaaccacggagaaactacaaaagctgaaatccgaattttccgaagaatataagattgttgtcgtcgaatctgccgaacaaacagagtcaattaaggaacaagtttctgttgctgtttcttgtgttccagctgataagcctttagatccagagttactaaacaaattggaaagacttttggcaaaaggtacaaatagctccttcaaaccaaccttgttagatgccgcatataagccttcagtgacccctatcatgaagctcgcacgtgataagttcaactggaatatcgttccgggcgctgaaatgttggttcatcaaggtgtggaacaattttctaaatggacaggtgcaaaaccaccatttaaagctatctttgatgcagttacccaagaatagataaaacattagatacatttaaacttcaaataacgtcacgaatgattaataatagctttctaactcccctttttatgtatgtctaatccactatttgttaatattccttaaagcattattaactgttgataggaaaaaatgaatcatgaatatataatgaaacaaagcacaattcaataggaaacatcattcgtatattgaattctagtaaggttcgtgttttttagaggtttcgatataagccacactttgagattgaatgtctgaatacgtaggggaaggtccttactcatcaccaaccttcgggaaatcactttctcttcgggttgatggtggatttaatgctgtttctatcaatccatctggtagagatgtcgtattagccagtcgaaagggcctttatgtggtagacttggatgatcctttctcagagcctcgatggttacaccatctcacgtcttgggaggttgctgacgtgcagtggtgcccgcatccggccaagcatcactgggttatatctacgtcgaatcaaaaagcaattgtatggaatctatctagaagctcttctaaagcagtggagcatgtattacatggccatttcagagccattacagatataaatttccacccgttgcaaccagaaatcctagctactagttcaattgatacttacgccctggcttgggatatgagaagccccaagaagccttattttagaaccagtaactggagatctggtgctgcacaagtcaaatggaatcacaaaaattccaatgtattagcaacctcgcactcgaatatcgtgtatgtttgggatgtaagaaagggtacatctccgttatctgtattagaaggtcatagcggaagcgttaatagcatcgacttcaatccattcaacgaaaccgaaatcatgtcaagtgggaatgacggaacggtaaagttctgggattataataaagttgaagatgaactacagatgacaattaccacagagtttcctgtgtggagaggacgatatctcccgtttggggacggatattgcatcatgccgatgataggaggaaataattctgtatatttggcgaactcttttcatgactcaggcaattctgagtcaaggactaccaaactacagccaacgtacgttttcaaggggcatacagatagagtcacggacttcttatggagatcgaggcacagtcaaaataccatcattgatgacagagaattccaattggttacttggtccaaagattgcgatttaagactatggccagtacccgatatggtttacgacaaagttcactacgaatgtggcaaagagctgccggagaagctaccagattatgattacgacacttttagatcagaacctgaaaataatatagtagatccccggtacacaaatatagaaattccgaaggaaacctttgttacaaaatccggactacgccaatggaaagctgacaacaatatagatcaactacaatggatttcgggtgtgagaatgcataacgaagattcaccgcatgatctatttgaagaggtgagtttaaacaatcttggagaagaagtcacttccgttgggcacaagttccctagaattgtttttgaaaaaatttcggtttcgacaggagagttaattattactttaaatggtccatgggtggaagaagatccagaaaaatacattttcatgcgtattattattaacttcccgccaaactaccccatgaaaggaaatgaacctgcgttcaagattgaagagaacagggaattaaaagaacatcaaaaaactcagataatggaacgactaagagaaatcagcaaaaaatatgtcgatgcaaatcgatattgccttgagccgtgtttacagtacctacttggagaagaagttaacttggatatttccgacatggaggacgacaataaaattttcagctttgatttcgaagatgtaacttctttagatagatcatctttgggttcatctgatgatcatagcgatgctcctacagagatttcttctgtatcagatgttgaattcgctgtcggggatggttctttgcaattgtattctagtacaccagaaccaaaatttgatagcacacctgtccccaacggttgtggagcagtttggaccgctcaaggaacccttgtttgcttctttagagctgagaataaaactgaaaaaaagcaacacgccataatcaatgttggtagaactggtattggaggttttgtgagatcaaaaaatgtccagagtgcgtcacaaactttgaaggataacgtatcgggaaaacaaagaaagccaaaaacttatagagaagcgctatccataaactcacaacatgccagtgaatcactaaatcaatcatcagattcggattcagatgatagtgatgatagctatgctgagttcttggatgatatattgaaaaatgatctcacactaaggactaggatgccaatgatgccacgcatattccgtgatgagacgaaatctactacgagtgtatccggaaaaaccaccgattcaaataaaaaaagcaagtcatctatagtcgttcaagattttaaaagtttgattcccgacaaaaaagagctagctgaacagtatattttatttcgggaaactcctgaatttgttgcgaagtacaatgcaggcattgcggaaagttacggctatgaagatatcgcgcaatgctggagaatgatttctaatgttttaataggaagaggagataacgatttctacaattatgattgggaccagcattcattgggtggtaaacttttagtgaaaagactattcgagtattttgagaagtgccaaaatcttcaaatgcttgcaatgatgagctgcatctttgctacgcttggaaggccagatcagaaaacaaattataaactagttccgcctactttatcagaaaacatcattacattttataacaatgaatacgagccatcgccacatgttcattccactcacggatcgttctactctaatgacacaggtacacaaaatgcgagaatgagatatggcaccaatcaagcctcattgaacgatggctcttctatcatatctgatgattatttccatcaaaatcatcatgctaacggaaacaagaacgggaaatcccataataatatgaacaatgggtatgtagaaactgaagcgacaattcccgatatcaagatcaaactaattcatgacgatgttttggatcttgcctaccaaggtctggaaccttcgttggtagatccgaaatgtgaaaccaagttcagacaatatagaacgcaatatgcagagatactttatatatgggggttgcctatggatagggccgagttgttgaagtttaatgtaaatttaaacacagaacctgaatacttgcatgggatcgaacaagattcgggattggatatttacaaaggtgtatcgaataggtggattgaatctaaccacggacacactcaacaaaactgtagctactgtggcctcaaagccggtagattggtgttcgtatgcggtaattgtcagcacgtgactcacaggacttgcgcagaaaaatggtggaaaattggcgatgagtgcccctctgggtgtagttgcgactgtataaagaacttcgatgtcagcgaaccacttatataaaatgcatcttatgtagcagtgtcttatcgttcatcttcttttaaccatcagtcgttgatacaccttctttcctgggttttaatgatatttaaacgagatgataaaccttccggaattctgaaagaactagaaaaccaaatagatggtgatgatgatgcgacacaagcgaaaaattccaggctacaggaaccgttcccgtccattagcactgatttacgtatactagtagctattgagtaccaataatttcaaaaccagcatgtcttcgtcaaaggtagcagtggtcactggtacaaacagtaatttaggtttgaatatcgtatatcggttgattgagagaagcgagccagaggacaacctcacgatagttgtgacatcaagaacattacctagggttcgtgaatgcattgatttaattaaggcttttgtcaataccattaataggactggctctgtagattatgattacctgctggttgattttaccaacatgatcagcattcttgatgcccactacagcttgtcaaaaagatacgatcacatcaattacttctttgtgaatgcagctcaaggagtttactcagggattgactggttgggtgcagtgaaagaggtcttctccagtccactggaggccgtcacaaacccaacatataaaattcaacgagtgggagtcaaatcaaaggacgggatggggcttgtgttccaggcaaacgtgtttggaccatattatctaattcaaaaactgcttccgttactccaggctggacaaggtactgtcgtttgggtctctagtatcatgtccgctcctaaatatttgtctttacaagatattcagctattggaatccgatgtttcttatgaaggttcaaaaagattagttgatttgttacattctgcaacatataaagagatgaaaaagctcggaatccgccaatatctcacccatcctggtatttttaccagtctctcatttttccaatatttgaatgttttcacctactatggtatgctcttcttattctatctggccagatggattggttcaccttggcacaacatacaaggatacaaagcagccaatgctcctgtatatgtagcaacaatggctaatccgcactttgagaaggagcaaatgaaatacggatcggcaacttttagagacggtttagaatatattaaaactgatgaagttgatacaaccggctgtgaagatgtgtataaatacatctccaatttgaaactgcaatgggatgaaaagttaaaagaccagattaagcctacaaggataccattataaattttacataattcaaataaatcgtgtagaattattgtttatcgtaatgttgcgtgcgagttgcttataagttacatattagatgaaggatcatttgaaagtagtcacatactatttgaaagtgaggacttaaggattcgaaaatacatatacagactttagagctgaagtacagtaaatcttgaaatatcgctgtattatctctttaatgccatcaaagaagcaacgaatgtcaatatcaatctcgaacggacttcgttgatgtcttctggaaccaaccagattagagctcctaactttctagcaatagaaatagccaatctggcgtttgcatatctgtcctcttcagttttaccaggtaacactaatgagtagtccacataacctggggccaaaccatttaggacatccaataagaagtgagcgttggacaacgaaggatcgctgaaagatcttatggtggatgattttccacccttggaaactgtttcttgagcccactttaagatttgggaatcagacatatctctaccagtcgtggccaattcattcattgtattgacaatattcttacgcattaactgccacaccaaacctagcgttagtagtttattaccgtcgacaatatcagagccatcaataccaaccaaagagaatcctctagatttacctaaatcaacagcatagttagtattttccaaagccttgaagcgtgaaagttcagagtcagatgatttcttgttgattaccttccagtttacagatccaggaataaccttatcatatgcctgtagaagtactaatccatcctttaagtcttcgaatagtgacacaactggaggatctacttccaaagaatttaaccacaaagtgaaaactctggcttctctctcaccttctgcatcgaaatcctcaatttcgataggttcgttttcatccaatggatccaaaccaggatgagtgttgaatagatgagcaacgaaggctaagtttaatttaggattaccagccactaatgccgttggagtcaaatactttctgcattccaatttttcagcgttttgtaaaacttcttctgctctttctagcaaatcggtggtttgtagtggtcccaatgagcatagatttgaatccaattgatttaataatacagtataattttcaccatccttgatatcagaagagaaattggagacccttctgtgccacccagcttgtttcaaatggtagttgaaccaacgcaacaagatttgttctgggggtagtcttaggaattgctccaaagtttcatcttcttctaataaacggtacaattccgggtgtaatttgatatcaatcttggatagcaaacctctcctaataatttgccaaattaaacctaagatcaaatgttctttaccttcaataatatcttcagagtgaacattaaccacaacacagccgatagctttagcggaattgatcacaatgttggcgttttcggaagccgtgaaagtgttcaaagccttgttattcttaggccagtttaacactctggtatcgatggtgtccgggacagaatcgttaatcaacttggacaacaccaacccatctctacattcgtcgaataattggaaagtatcggtagggaaaggaagcctatgaccaatgtctgcgtccccagctagcacggaattgatatgtgtagtgaaagcccttctttcttcttcattaatcgtgtgggtggtaccagaagtggaaccaccgacaataatctgagctttctcaccagtacctttgtgttgcaaaccaatcgatttaggtttagttggaaccggtggtgcacggttgctctgaccggaaatgttaggaaagctcgtttgtgggaacccctttgaattgtcttcgtcctgttgcgtaccttgagatgaaccgtttgctcttaattttgccatcaattccacgtaatcctccaattcaacatgacccgaagcatctacatcaacggtcttcaaagtctccctagcttcatcataagatgcaacaccagacttggaaatggattccaaaatttgaggtttttcaacccagcccttatcctctagatcgatgtttcgaaaatgctctatcgtttcgaagagatcttcctgagaaaactcagggaactttctttgtaatctaataatattcattattgatcagtttatattgctgtgattccaatcaattgcactaatactgcaagttgtaaaccgtataggcagaaggaaagacgagggcttcctttcttgtttcgggcgtggaatacggctttcaaggtttatgttttatattccaccatgttaaactttattctttaaagggcttttcgattggaaatggaaaaggagagagtatgtgatgttcgtatgttatgataattgaagggaattaaagccagtacaagcctcctggttcagcagtctgatcatacggtgctttacacgggtttcatcgtccgtctatccatttgcgtatgctatttatgcttgtcgcagtctatttgcattagatatattgggatattccgcactgtggaataatcttgtgagctgtgagggatgaaatagtcacaggagttaatactactagccagctattcagtgttttcctcgtacttccacgcctcattttggacaaatgctgtttggaactgccggagctgtttgtatagatcttgagatgagttcgagtaatcgaatttcggacttgtttctggcatgtcatcatccattaaatctagctgttctctccatagcgtttggtaatacggtacattgagcctggattcaggtattgctctatctttatcaaaaagtcttctcatggcaacctcttgttgttgcaattgatccacttttgtcttgtttagtatattatcatggagtatgaaaggtgacggatcgtatttgaaactgagagtgttttcagatatccctggtgccctttgtttcccattcatatccctgtttctattgcgttcattcttgtaattcaacggagtgtagagcgaagagtcgctgaatacatttgccgatgtgcccatcccaacgttgaaatcctcatctgttgagtgtttgacatgtttgatcctgcggaactgcgggcttttccagggtggcagacgcggaagatctatgttgtgctccatgtattaacttaagagcctgaacagctacagttgaggggttgaaggctggttcttggcaacattttgcctataattatgacaaattattgtgggtattttagaatgcttacctttgactgacatttgtggcattggtttaatgatcacgtgatatcaatggtaaacctaacagatttcaaacagcttggacatcccatagtagtgtcaatttcgaggtatctgattagattgttacataatatatatatatatattagatttaaagccgaaagctcacctcatgatatgcctaaattaatatgtttgtgtcttcgtgctaaatcaatccgcttaatgtcaaacgttcaaggaatggttgtagatcgtctttcctgatttcaataattgatgtctcgaaattgtcaatccttactttggcacctgtctcagctgctatttgttgaaatgccactgtgaaattatttaaagttttctgctgttgttgttgtaaaatgtccaaccctcttgggtaccttggcgcaatccctgcacaaagatatgtgtcagaagtctcatctaaagttgccaataccagtggaagtaactgtttttcgtcattttctgcatagtattcaatgagccatgatcccagcctcaataacgttaatggatttctatataaatgcaaatctggtccatcttgtaaaacacatagcctgtaaatccttaaatgtttcactaatcttttctccagaatagcgactccagtttcaaatacacttctttgtaaaaatgttgcatgcttaatcccctgagataaaatatccatattattgtccaatacatcccaacttgaccaaaaatttgcaatccattttttttgccttgtcttcagtattctgttaattttttgctcttcagcttcttcgtactccctattctcttcatcaccttggttcgtatcatctttttgagatacattagctgttgtcaaattttctagtgcgtttgaagcattgccaacttcaagtaaagcggttatcgattcgacaaattcactggcacttattgatcctcggtaaccgaaagttctcaagaacccatctcgtacaatatcttgtaacccgtatctatcgagatttttatcgaaaagtacgcccagatctctcttgaaattattgtccatatatatccagttttcctgtgtaacactcagcggaatacccatgcgtgcaaacattttatgcagtcttttcttgccattttcattccacagtgacagtttggcgttgacgtagttagaataataaaaactatcatataaggatgtatgcctcagaaggaataaactgtaatcgggacgaatctcaagattcaaagaatctggcgttttagttttttcactaggtgtcaatctttttacttcatctttcagaagtggtaatagtcgattgtataccaacgggaaggaattatccaaagaggacactcctagaatgcataaccataaataatctagatttgtctcaccaataccagacaaaagagaatatatctgaactgaaagggagttcagcaccgttgatccctgtgaatagtactcctgtaacactttttctaagttgtgaaactctcgctttcgttgtttatgtgatttttttggattcaattcatcgctggaccttttacccaatactacgtcatcgtcatcgtcatcgtcatcgtcatcgtcgtctttatcctcattttgcgtttccctgtcatcttcctcttcctcgctatcactgtcatcgtccaattcatcgccaagttcgttctctatctctataagtttgtagtatgctttcttttgctctgtcaaagactcttcgactgttccatcatcgaaacaggttatgcactgtgaaccaaataaattatccaaattccacggtctatgacaatcaagcacaaatatctccttcttaaatttctgaacaacgtcagtcttatctaattgaatctcatctaatggaccctgcgtgttttcttgtggatcaatctctaaaaaagattcaagatctaccatccctccacaacctacaaatataacgctattgatattttcgtccagtctctgatagtgatccttcaattccgaataaccaaacacgggaactaactgtgattgtaccaattgcttcttgaatagactggatagcatcttcgatgcacataacgcgtcaatgtttaaacacgaaacaaaaatcaccaactgacatgaagaatgagaactgcatcggtgaagaattttatcataagcacccacaaattcagcaatgccaatatacatcctctacctggcactttgatggcctgcagtggttttgtttgcagtctcttttccctcgtgagctagtcatctcatgtatttacataaatttctttaaaatattggtttggaatacttacacgtttaaagatttttggaaaatcgattacttgtcataaatggcatacatgcgaaatattcgaaatattcgaagagatgccaagatttacaagactataggtactaaacactgctatctgatatttcatattgcagtattacgaaatacgaagatcttaacttactatgaaactactgggaacaataattggttcagcattctttttacaagctgtgtctggattctttttcgattcaggtcaccagaatagacagcaacagcagcaacagcagcaacagcgggatgttggctcttaccagcaaatgttcctagataatgactgtccgcattatttatgtccacagacattggattgtgtgagacagaagtcggattgtgcgtgtccgttccctaattcacaattgaaatgcaatctacccaacggtcaggtaatttgcatctcaaagccagcaacacatgatccaacactggtagagatttatgatgatccagtaatgggaccagctcaacgtactgagggattcagagattgtggatggatcttggatgtatatgacggcaagatttagaatgagagatctttctttctgtatcggccataatactattacaaacataaactgataatatatatagagacatataatacagaccattactgtatttaatgcaattaactagcatgggtttatttttactcgtttgagttcttcgcggaaaagatcgttaccggttcggaacagttaatctctgttcttacctgcaacccatcttttgtataacaattcatggattttaaagtttctgaaaagctcatcgtactttgattgcttccaaagttccattaagtcatcttcaggtatgagttgttcaacgtagcataatacaaactgtttcttggctccgcccacgactctggcagcgcttgaataccaagtgtaatcatttgactggtttgcatccaaaaccatgattccatactccgcatgttggaaagggggtcctcttctgtataataagtattcgcaaccaaattttatccccgatcgtacacaccaccctttggacctgtaatgatggtacgcgacatattgatgaattaatttcttgatgtcttggaaacttttcggttccagtaccaacgaaaccattaattgttgcaatgtgatcttcaataccggcactgcataagagaggaaaatagcctcgacgggcatcaattgcaagctttctagttgaatcactgatttgccttctattaatcttaaatcttcgtcacgtatttgcatcgagtccttttcaaaagctaattctttatctctttgattctttaagaataacctttcttgttcaatgaattgttcgtctacaatccccttttgtctcatttctaacttcttggcttcaaattcagctctcagtttcttgaattcgagccgctgccttcttctaacgtctgtaacatgctctaagttgattcgatcagcatcatttagttgcaatcgagacattgttcttgcctgccagttgggttcactccgagatagttgaccagtaccaaagaatccgtgttcccataaatacttcatctgccattgatcacataccaaaatttgacctaattggttgatcttgacgtcaataattctggtttcactccatctcatcgcccaatctaatatccaggaaaatgcctgaaagggatgtttccatacagacggtacaggctgcgcctctataggcaacgcatgtttgtattgcagctgatttctatgagatcgcttcgacattgtaagtacttgcctcccgcggtcttcatatatagttactaaacatgcaagagagattagcattggacaaaatatggttttataactgatctctaattcaaaagaattaagtttcaataactaaaaactcgaataagcagtacagagttaaggagtgatattaggtttacatattttactaagaggggtacgaattagagtagagaaaggacaaatcagataccgttgtagtctattgagaaatcgtgtgctcacattgaaataaattcttcgagacatctaaaatggtttatcatcatatataaagaaaaagcccttcaaaaaagaaaaatatccacagaggtaacatatcttaccgctcactccatctggaatctatgaacagtaagtatgctggctgtatgaatcaactacagttggtttattttttggttgatcagaatacttatatatgtggcatcaaacatatcttttctcttccaagctcatcgcttttggccttttatactgaaaaatgaaaattttcacgtttgtgaaatgtcagtatcacatacaacggacaatttctatacatttcgggctctaaggaggcagagattctatgtgttgagccgggtctgggttagggctttaaatagtttagtaccatgaaatattggtatatttttatttattgttgatattgttattacggtatctagttaaagatctattgtacagttttatacttttttttaggtttttgacgtgatgttgtccatctacatggatgccatctctgagaaatactgtcttaagataatggataacatttctgggagttcggtaatgtcatgaacgacaacgtagaattcgaatgggaatgtgtctaggtatttctggactgatagtttcatgttgccgaattgatctggaatatagttcacttgagacatatccatgattgattcgttagagttaataccatcgatgacaacgaaaacgagcatgattttattttcccttgctctgcgaaccaatcttactaatgtttcgtggtcttcacaaacaccatcggagatgataatttccaattgccataggtcgttactctccatagctcttgctctttcaaagatcttgatactttcagctaccaatttcttgacatcggttcttgtttcttggaaatcaaaccattggaaagtctgagcaccagtttgggtattgaaaggttggttgaatgggtgaacttctcttacagtttcaccgaatttcacgatagataaaccaccggattcaagttgagttaaagccttagagactaaacagatactttggaaagccaaattgacagattttgattcgctcatagatttggaatcgtctactgcaatcatgatttgatattgacgcttacttggttttgttcttcttaaccaaatcttgtccttacggtactgtgaagcaatatatggaataattctcttcatattcaaccttttaccagttttgtaatcacccttcaactttgtggcaagagtaggctcaagaatcaaacgtagctgttcacttaaaccggctgccaactcgttcgtttcttgttcacttctcttccatagttcacgggcttcgtcgaatggtcttggggccacagcaacagaattttcttctgatacttcgttgtctacttcatttaagatttggtcgatatcgttttcgtcagaaacaatgtcgttttgatcccataaagcgccagagttctcaagagcatttctttcaccaatgaaagctcccttgcttttcccgttattctcttcattatcaatatcaccgttttgtacttccggttcatcgatgtccatcacatcagttgggtgtttctgatcttcatcattctcattttcaggttcagctttttcttcgtttgaatcttcatcaatggctaggtcctcatcgaacccagttaattgatctttatcagcagatcccaacgcttgcgtatcagtctcggtattggcaccgtcgacatgttcaaattcgtcaggtttctggttggagccttcaggctgttgctcttcagaattggtggaagcctctttgatttcttgatggcgtctgtggaattctttcaatgaatcacctaattgctttaagctttcttgcgcgtctttacgagatgtatctgtgatttcttcctgattgttttcctggctttgcgattgcgcgttaccagaactaccaatatcttgttgttcttcagaatcagctgcattagagccttcaccctttgcacccgaatcttgttcgacagcagcatctgtatttatttgatctttgtcatcttctacaccctctaatccgtcgaggccctctacatcttcacccttttcatcttcacctccttcttgttttggttcatcttgcgggttttcaagttcactgtctgaatctgctattgcttcttctttgatatctggtttctctgtatcatcctctttatcaagagcctcttcggtttcactattatcatctccatccatatcaacgtcttcatctgattcgcggttttcatcagcgtcagattcttcatcaatgttcgtttgttcattttctgtattttctggctgcttaccttcttcttcctcctcatctacctccattttatcctcgaaatcttcttcttcttcttcagagccatcttcttcattatctttgtcagaatccaaattcatgtcctctggtaggtccattgtttctacttccgggacgttattttcgagattctcgttttcatcatttctaacttcatcttcttgttctccaacatcttcttcctcttcttcttgctcttcaccgtcatcatcgttatctttttcttcagtttccatttcatcagtttcttggttttgttggtggtcttccggcttgacatcatcttctgcttgttcctctgatgcttgtacatcatcggcattagatttttcaggcatgttctcggaatccttctctttagaatcatcttcagcttcctcttcccacatcttttcatccaatgcattaggatcatcctcgtcaagattatcaatctcttcatctagctcgtcttcatcgtcctcgttgttatcatcttcttcttcgttttcttgatcagatgcattttcaaggtctccggcaatatcgccttccatttcaacagcatcatcttctttttcttcgtcgtcttcgtcgctgtcatttcgttgatccttgttcggttgttgagcatcttctaacaaatcctcatcttcttcaacatctttgctattattttgagctccatctccatctccaagacctgtaccctcctgcaaattgttatcttcggtctcttctgaaggaggctctggagaacagaatccatctttagcgagattgtatagcatattcgagaagatataagtcgatttgctaaatttgaaataattctctgaagttgtattcaaaatgtcattcaacatgctgaaatagtgattgataaatggcatggtaaatgaaacagctgcagcaaccattggagatgattctgccgtaaatgacgttgacttaattgtagtgacaagatcatcaatcaaagcaaagatcttgttgcagttagcaatcttgatatttgagacaattcttctattaagctcgattagccatttatcatcctcttcagatatgggagtagtattgttttcaactagtttttggacagaaattaaaatggcagtactgatccggcgtaattttccatcaagttcttccagcgaagggtcaatagtatcaaagataacatctccatgagaaagagcttgttgaagccatgattccaaaagatcatacacaaagaatgagtttgtaccattcatagctgatatagcagaaataaattccttaaggaaggcattgaagttttccaatatgttttcagtggtatcactgtatatcctaaacatttcagattgtgctaagaaatctagaagtttctgtttagacgagtataaatatgaaacagtggatcttggaacctcatgagctgtactgtcttccacgtactcaagaatgtaatcgatcaattgaggcaaccacttacatatgtgcctgaacgttccaaaattataagatagatcgaaatgtttcaaaacatggcaatccagggaaacactctcaaggtctaatctcagggattcaattttactataagtgtgcacaaatatagagagcggttgtctgctggcaatcaacgaaaaaattaagttctcggtcatggccatacctttttccaagtaggacactggaatatcgtctgttgggaaagcaattgcatttttcaatcgtggaagcaggtccaaaattctaaagaaatagacatcagaagaatctatcgcggtttctctaaatgattttgagttcgtcaacactgatacaacactttgttggatttttctaatatcttctctaaagtttgatttcaaaccaattcttttgagctcctttaaggagtcactgagtaatttactcttttgggtcttcaaggtagccaataatttcttcttttcctttttgtagactgtaggggtttcttcacgaagccttttcgcttcttttgagatgtaaagggcatactctaacaaatctgggtaattttgattcgtgattttggaaatataaatagaaagattcttctgtgtgatgtagatatcttttaaagattttgatctactttcccatcccggaatatttgtgacaatagatttggccccagaaacatcgatagacctgaagtgggagattgttactctttcaaattgtttagttactggcagagcggaatctattccgctttcgatcatagaagttaagggttcggaaagtagcgttctatatttgcgaacaatcttgaacaaactattgtgagaccggcgagagctttgcttcaaagcatcgatattcacatccttccaacttgccaaaagaatcacctctgatatctctttttcaagaagcttttttcctgtttttattttgtcgttaacaacagaagtaaactgctcatagaaggagatgatattttggagggcttgtgaaattattgatgtctttccatgcatcactgaaacatgtttgcagaatgcttttacaagtcttagacgatttgcgaattctcccaaagtgcttttactgaagaaaacattcaaagcagaaagaagggaaccagatctctcagaaacgtcaatattggcattttctgttcccactataatcgtttcgaaaagatagaaccaccaatttccaatggtctttgtactgttcatatcctccatttggaataaagccttccaagtgtgtagttccaaccttctccaagaaactatgagattagttattgagtcaacgtgagcctgtagggagactttagaagatgcatacttttgccactccaccacgaaggtgtaaatttgctctattttctgcaagagtcttgccattggtgttgaaacaggataagaaataaattctttacagacgcggaaaagatcccgcaacgttgcatgctcgggccattctttgagtaaagtgttgacattgttccacaaaccttggattacatgctgtgcctttttggtttcaattctcgaagtgcctctgtaaaagtcaaatatttcagtgttgctagaatctttgaaagaattagttttctcagacaaagtcttgatggcagcaagaaccattgattcgttcaagttatatagcttgaaatcagagcaacttcgtagcaaaataacagaagtttcagatccttttctcatcacttgactcaaggaaacatttgaagcgtcctcgaatatttcaatgtaaattttagcgatctcgtagtacgtatcgattaaagatgtggctgatgattcctcaacaggagaatcgagtgaaactgaatcttcgtaatctgggaacattgccttaaattcggcctcaatgtcatctgaattgtcattgaacttaaaaaggctgttcttttgctctgcttcttgctcacttttcattcttcgcaatgaccatctataatatagtggctgtaggatttcattcaaactatcaatcatgctttcactatctttgtgggcataacataaattcaagaaatgaattaaaatctcctccacatcgtgagagccaacattttggtttttgaggaatttattaagcctagaaaagtggctcaaaatagatttttctctggtaaccgctaagcaatccactgtaaataatggagagatgtctaattcttgtgattcattttctgcaccaagagaaataacattgaacccaaatttcatggcatacacgtaacctgcgaagatgtcgttgatatccgaataaacttcatatgttgatgagagtctagaaaggaattgagacgtgttctgttcgaacattttgaacctactatcagagattgagttgtactcagtagaagattcaagtaaggagattactggagttacatccactgttgacagcatgaatgctgaccattcatcaaataacgaatcaatcgagtgattaggacggaagactctgggcttctttggttcatcgtcggaactgacttctgggactaatttttgagtataactatcgacatcaccaaataatactgagccagcacacttccaattgtgtattatcgattcagtgaggcttttgtgagcaacataattgtcataaatgacgtagtctcgaatagcaggatcgtacggagaacttgggacatataactgcagaagaccaacagcaaacaacacccatgctttacccaaattttgtaggcttctagaactgtcaatcaaaaacagtgatgcacctaaatatttagcaaatactggtttgaaccaagtacattctgacgtggcaacttcagcttcaagttctttaattgaaagagagtacaaatcgagcgagcttaccttcaaatgcactgcaataatcttcaaaacccaatctttgagaattgcggagaatattgcatattggtcttgtaaaatgtacttagaagacttgattattgattcggtcaaaaccctgccatctcgcaacgtctgttcaatttggcctcctgagaattcgtaaaaatcgttagacttaattaagatgttctcaattagtacagggctgaaaacagcctttgtatgtgaaacaaatttcccattctccttcttccaaagtaagctgaaaatgggagggtacagagtcccaacggattccagtttgatgagatccatgctagcgacagaagagttgggtaatatggcataaatggttttcttggtctcctcgaagtcattcactaaaaatctcaataatgacgtgaattcatcctcaaaatagtgtttccttttgatcaaaaatgtagacgaaatggtattgagagttgaaatcccctccttgagcttctctaaaatgttttcagattctgctgtattgttgtttaaaatgtccatgaaaagggcattaaatgtttctgacaactgactaattagagggtaagagtcaaaaaattgtttcttcaccatctggtcaaagtcacccgataatgactcaaattgcttcaaaatatcccaggtttctgcagtcaatggataagctcttcttacttcctcccatatcatatccattgaattaccagttttcaaaacagctggttgagctatttcatcaagtaattcttgtacttggttaatatcaggtagaatcgaacatgacattgaagcccattttgtgaacaattcttgatatactcgtagttttgtctcgtctctgtcctttgaacatgaataagctccaatccacaagatgtaaagttggaatagagaattatacatcttttcgactgagaacaatggaatgttcttgattgaatgcaaagcaaactctatcaagcttttcaatagtttgtaaacttcgatatgtggtacattctttacgttacgtccgaaagctaccgctgtggaaagttccaaataagatagttcattgattttaccattaactgccttcttttgtgcgaagtccaatttcccttttgcctctaacacgtaccagattaacgagaagaaatatacggattcagaagtcaatgatagaggtgaattctgttttacagtggctgcaatgtacgaattcaaagttggaattaagctttggctataacagaactctttaccattagagagggtattctgaacaatgcgatttaacggagaataaattgcctcaacttcagaaaagacccctgattctgtaatgaaatttgtcatgagagttactgcatcacagaaatctacctcatcgaatagttgtgagttgcgcacatttctattccagtcatttaataggtagattgcgttcatattaatagtcgacatcaagtatggagaaacttctccaagcaaggacatgtcgtgtaaggcaacaagagattgaagctttgataatcttggggaaatgaatgctgataacggtatctttgacattgaagtagcatccagttgtaaagagcgtagtcttgcttcaacttcgctttcagtcccaacttgtgacgagcactcgattcctaggatttttctatcttgagtcgatgctcgaacaggaagagcattgatgaaaacctctattcctctatttctcatagctcttgaaagttctccaaatttaggatccatagttaagaataatctaaaatcgcgatgtggctttaccactctgggttttccatcggtcaaactacattcgtttatcatcaaagaaccatctgtttctaatagtgaattgattctatcgagaactgatggagagcaaagattggcattgtctaaaatcaaccaatgaccctcctccacagccttgactagcataccgtcaaaccattcaaatttcacggctgcaggctttttcatgtgctcgctcaaatcttgaatttccatattaatttcgtctatcgtagaatgcacttgagttaaggaatagaacttttggaataagtggacaaagtcagtgaaattaaaggaagacactgatgatttcttaataaaatcatacaaagcaaatgctggagaaagtgcttcagtatctgttcctgtggaaagattgatggtaattagttgttgcaagatttcagaaagtttctgaatgatgttcgcaacttttctgttcaaatcaagttgttcatatccaccaagaatatccatgctatcaacatcgctattcatcgaaaattcaattgtcttcttaccaatgattgacgctatcaatttcaccatgtcagttttacctgcattcgtcggtcctaccaatatcaacggccagttgtgtttgacacaccttagtactgattcgtatacgttgaaattacattgcaaaggaaccaggttacggagtgaattgaattgaatcactggattcctatcaattacttcggcattcacttgcaaataagaacttccgactttaaacaatttatctctactcgtaatttctccaaaaatttcatgtattaatttcatggcttcaaactggtcttcttctgttctaaatctttgttttacaatcatttccaagaaatctgctgcgttgatatcgtcacaaattgatgcggaattcaaaagttttaaccacctcaaagtgtctctaaggttaaactcccatggcgaaccagcacttccccaaagtcttctgttactaacgtcttcctctagtttagacatcatttgaatcattttagcacagacctcagagtcaacattggggtacatatgagtcgcaatcaataatagatcttcagctgttagcatatcaacataaacgacactgaaacgattaacaaaggactttggtaaaccctttctgccaccaccttggtattgcggattttgagcggcaaaaaccaagaaattagggtgacgagtaaaaactttgtctagctctggtatataggcttccccacgatgatctagacaagcatttaacccttctaaaactgattgcgaagccaaattcatttcatccaacaagacccattcacccttttgcatggctcttaggaaaggcgcatctctccaaacaaattcaccagtcctttcacctggtgcatcaaatccgaatagatcaactagatctgtctgttctgacaaatttattctggtcaaagtatttcctgtgtactcagctaaggccgaaaccaaactggttttaccgacaccgggacttccctctaaaagaataggtttgcggacgtttaaggccctaactactctcatcatgttcatagatgtggttggcgcatttacagtgaaagatccattcgagattgagcctgttgacctgctcaagctgaatcttccagattgcagcctatcctccgttacaataacatctactttttcatcaaagagtggcgttaagtcacagccagcaagtttagatagcatacggacgcattccaacttttgttccttaagccacgtctcattggcggctaagtgagcagtattgttggtacccaatgcatcaatgaaaaccatcgcagcaccatgatataagcagattttagagtcttgcagttcagccatagttgcgttgatgaaatctacccatgcaagaatatctctgagagagatgacaccagtgttagttttgccagcaccgaagtgtttggcaaaccactctgagaacttgacaataatttctgggaggtttttctgattttgcttcaatctggaagaaacaataatctccacatctttaaagtcttccatagaaggtacccagatctcggtgaaacgattttttaaggcaggagagagttctttcttaccataatctcctcccggattcatggtagcaaaaaattggaaaccatcagctgccgtaatgaaagaatcaaccgtccccttttctgccaataataagctacgttcgggttctaagacactattcaacctttctaaaacggaatcgtctgccaacgatatttcgtcaaataggaagaagctcccagactttaaagcattaactaaaggaccatcacaccattcaaatagaattttgagtgaatcccttaaagaggtgatttccgcttgtacatctggaggtacatcttctttggtttgcttatcgtaggcggataagagttcttccagcgtaacatctacatctaccacttttaaaaccttctgcagaattgaggtcaaggcggattgaatttcagatcttttccgaacaggtctttgagctcctaaaatatcaccagtttcggtgttttgatgggcatttattgtaataagttcttttttatagtagttggaaattagttgaaatatagtagtcttaccacatccagtctcaccaacaagtaaaacaggttcattattttttaagcagctgttgacaagaacggcaagccttttcattcccttggtccacactacatctgtgttcaaattcaataaagctgggtcttctaaactggtgtaatattggtccatatctagttttactttcataacggtttcaagaactcttttaacaacttctttttcctccgatgacctacatctttcggcaagtagcatgtaaccattagcagcaagctcttcgtaaccgacagcaggtcttagcgcccatctgaataaatcacgaagtgttgcaaatgaatttttctgttcgaaaagtctattggccgagcggtttacggacaattgacgatagacttcgacaatttttttggcataagatggagcaatttcacaccgttgtttaagaatgatctcaagctcgtcctgtggaatatcatcaaaatgtaattcaaggaaacgatttctgaatgctctggataacactttacgtccaccataaatgcctgctggattttgtgttgcaaaaagcataaaatcaggatgtggatgaacaacttcctgagtctcgggaataaataattctctattgtcatcaagaagtctattaagtgcctccaaaacatcagtaggagccaagtttaactcatctaaaacaatccaataacctttcttcaaagcttcaaccaacacaccttctttaaaagaaagttttccagtgtcatctgtcacataagtaccaagatactcttgtaagtcagtatgctcgtgattattgatccgcacaaatttatgaccggttatgtcggcaaggtacttgatcatagaagtcttacctgcagaagtaggtccttgaattaaaacaggaaaacgtctgccagaagtagccctaacaaggttcaacatgttcttttctacaaatggcgtaatgatataatgaggttgtggtgtaatatcagcaggtccttgtttcatccaataatgtctgaactgaacataattagtacctggagaaggaggaatttgagacatgacagaatgtggattttttattctacctaggatgaatttctctataatcccccttaataattcctctgatggtagattcaacagtgttaaaaatgccatacaaaatccttcgtacaaagatcgtcttaggccataaatatgtacaatgtccgtgacataaagtaatgttctggtcaatgtacggatgctgaaatggggtctttgattggaaccatcgacaatcttattagcttctgcaagcctttttgcttctaaataaagttcagcgatgtcgttaccaacccattcgtcgcttacgctatactttgaaatgtacttgtcaatgatagacaatagatcagagatgtcacggtcaggagaatgaacataaacttcggtaaatcttgatcgaatacctggtggtaaatctctcttaccgacatctgtagcagggttcatacaagcgaaaattctgaaatctggatgggcttttatcgattctgcctcacctttttcagatagaagtatacttctagagtcactttctgaaagcaaatcagctatgttttcaagcgtgtctgccgaggccaagttgacttcatccaataacaaccattctccatttctgacagccttcaccaaagaaccttccacaaaattaaacacaaacgagttttccaaagtagaggattgtaattcaaatgattcaactgtttgtctgaattccttccatttttccaataaagcttgtttactctcagggtcgagtttacgcttttttttcttgtcagcttcctctttctcatttgagtccttttttagaatgctatcagccattttaatagcttctttccaaagtttagcgacgttcttccattgccccttggagaagcacttatggaggagtttatagaacttctcgttcttcttcaaagagaatgtagcaaggaaaagcccctcaaaatcttctagaattggaattgcgacagtcctacaattcacaggcttgtaaccacctaatagatcaccgctctcagtctgctgggaaacgttaataaccgtcaaattcttattcattagctttgctaactcttgaactacagtagttttaccagtaccggtctcaccgactaataatgttggttcacacattttgacggcaacaccaatttgttccattaaacgaagagaatgattggtaaacgcaaacgatgtagtgttggcactttttttatgaatagttgacttgggtcttcttaggtgagctcttccaattttcacatcatcaccagctttttcgattgccggtacatgcttgttcaagaacaacgtgattctggaaactgaaacttcaagctcttctccaattttctgtactaagggctgtacggctccatattcactaatcgaaccaacaaaacaatcgacagcttcagcaaaaatatcatcatagatagacgactcgataagttgatccggtttaacaacttgattagcttcaaaaagttcggtgattctctgacttagtttaactaaatctcgaacactaatgattcttggttgaacacctttgttcaatgaaacaaattgtggatttctgtaaatatctttcacagatttgtaggtgctgataagtttcggtattaaggcagttaacaaagaaaaccttttttgtagaataagcttcaaatcgtcttcagacggctcatctacaaggattttctcccataatctcataccaatcaggtcagactcatgcgtaatgccaccatgggaggtgtgctcgtctagtcttattgttgctaataactggaaaccgttggcagctttgatgacttcacctctagatggaatggatatttctcttttttcaagaagggtaagaagaacagacaagacttcggttggcgctttgttgatatcctcgataagtacccatcgtccctctttaactgctgttgtgagaacaccggatctccattcaaaagaaccgggtttttcacctgatgtatatgtacccaaaagtagtttagcatcagtttgttcacctaaatgaattttgacaacagaactatcgcagttcattttttttgaaagctcattgatcaaaaatgttttacctgatccagccttacccacaagcattacaggcttgttgcgctgaataccttcggccaatttttgtaaggccaacttggcaccatccgtatatactagatctgactttagatgttcttcattagaaggtgcttcggagattctggcaataaatacaccacatacttcaacaatcaacgacgaaagttcattgatatcgatgttgaacgattttccagttggtctgaagttctttggataagaaacaagttcattgatttcatttggtagactatggtaatttgagagccttttagcttcagtaagttccaaaaattgataatctacatcggaagcaccttcaaatacacttaagataggttcagttgacagtttaagttgattttggaccacaagttcacaggcgtgctctgccatttcaataagcatattaagaacttttaatgacaaaaatttgatgattgtagattggtgtgccaaaagtgaattaagagtttgagcattgatatatctctcaaatctgatcttgtcatactgaatcaatcgataataagccaaaaggatcaactcgatgtcctttggatcatgagcttggtaagtttgtaacaatgcgttaaagtagtcaccatttctgagcaagaacacttcgatcaattgcgaagcttccggatataaacttgcaattctgcccaatgcgtgtaataccgtgacaaacttcttggagtcgtgttgcaaaatccatctagagcaacagtccaagaatatattcttgtaaatgtataaatgaggaatcgttaaatcttcttttaacgaggaaaatgctaaattcgacaagttctcatcggttgaaagcttggcatcaaatctataatagtcagacaagtgctgctgagtaaaagccttctggtatatagtgaagttttcctcggccgcagtaacatctaaataaattaatgcagaggacatggctatagtaattcaatccttcgcccctcttataagcaattcttctttctttcctagtcaataaacagaggcagaatagaaaatatccgtttcgatgttttgatactctgtgaaagaagtgatatgccttactttgctaagtctatagcggatctgcagttaaatgtatcctacactcaatttggcagtttgtttaaagtcatctcatctcatctcatctcatcgcttttgtttaaaaaattctcagagcacagaaaaacaccaaaaagaaataaatatttcagtgaaagaaagatatacctgcaatccatctcatcggcaaaagaaaaatggatgggtaagagaaaagaatgctttgagagagccattaacagcaagcctaaagtttacaatccatctgaactccattgtcttccgatacattcctctgtatgcaataattatggtcggtaatccagttttacgtccggttgacatgaaaatgcaacctgctccgtatcaagacagagttagagttgtccaaaagatatacacacagttaaagaggtttcaatcgagcagccctcacattataaaggcatcgactatttgggaacatgaggttgctaaaatagcaaaaacaagacaaagttacgcgttcaatgcttccattctattacgagatattgttaaatataagggtaatcttgataaaactggcaaacctaagaataatagttcgtcattaatacaaaggtcccacgtattgcaaaaactacgatctttgctactcgacgaggaaacactcagtaggaacggattttttgtcaagatgtatgacactgatccgatcaatgaatcagaatcagattatgtggaatgctatagatgtgaaactaaatttgatgtgacaaaaattatggaaccgacagtatgtcggtaccaccttcaaaggaaagtatataacagagaaactaaaaaaagagaatttccttgttgtggagcttcccttgaatcatattcagacatatctgcagggtgtatgaaagcgaaaaatcacgtttacaaatgggagaatttcacaaaactgtcgagtgtggtcccttttaaatctctcgttgatatcaaaggcgaagagaacgttttggcattagactgtgagatggctttcacatcgaaagggtatgaaatgattagaattacaatagttgacttctggtcctcagaagtagtgtatgacaaggtaataaagccactgggcgaaattatagatttaaattctaaatttagtgggattcatcatatagatgatactgcacctacaattcatgaagcagaaaaatgttacatctgtcctagcatgatcaatcaaaatagcatacttataggacatggtttggataacgatttacgagtaatgcgcatagtacatgacaaagtaatagacactgccgttttgtatccagcaggtaagtataaatcctctttgaagaacttgtcttttgaaatcttaagtcgtagaattcaaggaggagaacatgacagttcagaagatgctattgcggcaatggatgtcattaaaaaaaaattgagtatccccttggataagaagtcatggtaatctatcttctagtctagccattctttgctctagttcttctattcgagcgattaacgcctcgtttaatttcctcatttcgtttagttcaatagatataatccgatcttcaggtagcttgaacatcactgatttggacctcgtccgtctttcatttttttctactctggaccctttcatggcgttaggtgtgtcagttttccttttcctcttagcggtgtcggtttccgtttcttctttgtttaacttgtcaagtagattcgctttcaccggactcgcgttgttgatcttgaatctgtttcttatcctcgatagtgacccgtcacctccaaggactggtacattccttaacgctccagatgcctttgtaggcgaatttgggaaaactatttcgtttatcttcacaacactggatttctgacgctcgtatctatcaaggcttaaattgggcccaagtatatcaggtgaaggcaacctctttggggtttgaactctttgttgtggtgataacctggcagcaggcttctccaggagtttacgatttctattaggtgatactgaaagacgtttgaaaatttctccactggctgacgaaggtggagacgcattactagaaagttcttggagggggattttggatggtgactccattttggcagctggtgtcgtctctcttttgtttaaaacgatcatttttcccgcaactacgtctcatctcgattgaatcaaatccgtttgtttacattttttaaacaatctgtatacacaatatctcaaaaatctggataatagtcagatgctttataccgcaagagtataaaagtttatggtttgtacagtttgtacgaaattggagtctatgtgtcatgtgctatgttgagtttatcatctctttctttaatcaaatagtgtttcatcgttaatgacttggtatacttgattactttcgtaaccagatgaataaaatattggcttcgtaaatttttgttcatcctgttcatcaacgatagttggcatatcgttgataaccagtatatgtaacctggggaagagttttagaaagaagtcgaaagttctcctcattgaatgacatatacaatgatacaaagaaacgatatcttccggagttattttagtatcagtagtgtcagattcatattcgtaaaacaggtcatttagaagctcgttactcttcttagcgagttcttcaattgactttgatctgtatgcaatgcagggggacgttgttagtaaatggaaataagggattattgggtagagtttaaagatatggttgatgaaatgtttagaatgaatatcactcgagttttgaatcatgaaagcctgtttggtagggaaatattttttgagaataatgtcactgtaaacatgcttgcaactatcgcataggcacatttgattgagttcaaatattgcaaagtcgtctagttcaattacgtcaagaataggttcatccaagtcgtcaaatttacaatctatgtatttcaacgtcttgatgccagataaaatggtaaggatgtctttagataagacgtgatcaaacataaagtctaacttcagttgttccaatctagtgaggttagaaaacaaggataataggaagttttcgttgtaaaatatagacaacaacgaaatctctttgaggtttttaaagttagaaagatcgaacaaaccatactcttcgtatacatccaacgtttccgtctcgtaccacgacaaaatggaaagcttttccaaagtattcacatcaaataaatcactaaattttgatgttcttggtgcactctcgaatcctggaaaagaatcatttcgaagatttaaacatagttcagttaactgtaacttttccgatagtgggacaaagtttgggaaccacatgagtgcatcaaagtatattgtaaggctcttgatattggcccaattaaatttgtttgccatagatgttatgctagtcaagtacgaagcatatgcaggccccggaagttttgcatgcgggactatgtctaaggattttaactgcgatgcaagctgagacttggagatcgtttcgaatgtttcgatatatagaaagttctcaaaataagtaatatttgtcgcatgttcacatatgagcccggtaaaccttgtcaataaattccgatttaaatgccaagtacagtgtatcttatttattagcttgcaaagttcaacgttcttgcttagagtattgaatagcgcttgaaacttaactgatgatcgccctgcttcagaaaacacaagcgtagaccagttgttgccaaaataaggatattctgggatgtgtataattggtctttcgttcaaatataggttttggtagagtgacgccactgttttatcgtaaagttggtgagataccatcatcaaggatgatttttcgatttgagataaatatcccagtatctcaagccatatttcgttcggaagctgttcgagcatttgtgctgttatattagtgctgttttcatcaattgagtgcgttgttgcattccgtgtgcaaaagttaacaagcgtttcctgaggctaaggtagcatttgtattaattcatcagtagcttacaaatgattggcaatgtataagaatgtcacgtgagcgaatgatatggttagtacgaatttcacaagaataaatatctagtccatattaccctccgtggttttatggacatttggtcaatttgaaacaatacagagatgatcagcagttcccctgcataaggatgaaccgttttacaaagagatttaagatttttttttacaacttgaaatgagccaaattcaaaatggagtaccaagcttttcgataattgaatgattggttaacgaatatgtgtcgccagctgcgacaagtacacaaaaaaagcctgtgaacaataatacatatatactaaaaaaaaaaaaacaatgtctataataaaaaacctcctccgttcgaatcacgagagtcgcgtaaaagcaaaaataatacaacttaaaaagtaaacgtttttaaaatgagatttgtgacagcagtgaacgagaagatgagcagattcgactggtactagctggccaatgtgtcaaactccgtaaagaaaatatgcgactcctacatcgaaaagcttgaagaatgaaactttagataatagaatgatgcactgaaaaaatttggctaagatgagctgacaaagaggaagaggttaagaggataatgagagatgaaatatgcaaatgatgggagacggtgagaagatgttacataagtaacagttcaggaaagcagtaaaaaaattcagtggaaataggtcaaaaattaaaaacgtctgactctgcgcaaaaagactttctttcagacaaattgcaaattcttattgaactgtcttaaatttgagatacaattcaattttagtggaaggaagatgatatgctcattctttacccccaagcgccaaagtgagggccctacaacgtataaggataaacctggcatcatgccatcgccgttactgaaatcgtagatttgttcattggttttgatctcatcgattttcgagcagacgtttttacatggcaatccattgatagtcaaatcagctattatcgtgcaagtgaggaaaacgtatcccttgaaattaggatattcgaattgagattcattgatattgcgttgtttcctgatgtctgtgaacaaactcttcaaaatacggcagtccaatgggttagcaacattgacgtgaatagttttcattctcttattgaaataaagagtcaagtcaccggaatcgatttgtaccaccaaatccctcggatttttatccacataagggcgttggtaagagatcatatcccattctgccggagattccatttttcttttttttttgggacaaaaagcggattcctcagattcggaatcactgcgaatgatacattcatttatgtcttcactttgcatcaatagtttcatccccgttcttctgagatgctgtaatttcatagtgatctcctctcttttgcaaaatggattactagtgatcttatgaggaaggagtctctgttgtaaattaagcaagcagtaaaacttacactctcttaaaagattattgatagagatatgaccaggtacaacgtagtcgtcatccgttaagagatttaggatttcttgaaacaattcactggatctagtaacgaatgggatgaaatgagatgggggtctgatcatttttttatcgtggaacaagttctccacatcgaccaacatcgagtcgatcaaaagattaaaataattaggggagtctccgggtctatcgaagacactttttgagaatttgaaatgcttaccgccgatgttaatgaaataatagtcgtatttttgcaacattctctttaacctaggtaatctatagtacaacgaatccaaaaataaggtaatgaattctttctcatccaatattgatagaggatatccttgtaaatgggccataatagtctcgaaaacaacatccgatctatcgatggtcaaaacgtgagatgcatctgcattctcttgagaattgaaatagtcagtgaaaaaagagggaccatcgctgcttagcgatgcaccactaactttaaacaatttcgatcccacctggatctgataaatattttcatgggccaaaagttctggtatattgatcaaagcttcactagtatcgacaatatccatcttctacaaagtaattcgagtctttaatatctaacactcaggctctggaatctagtaatcttgatccaaatttaattttttcactgccaccaaagcaactgtatgaaatgcacagtttcaataaagaatcaacaaaatacaagttgaaccgtaaacttagtagacttagagttctacaagcatcccaaaatattaaatacagtagacatctgaaaaaaaaacagaacacacgaagaatcaaactataaaacctacaagtaccgtatatatctaaaacccttctgtctttgaaatactcaaaatgtgtttccatttgtaatacaagtttaaatttcaaatcccaaaatttcatgcatacatttttttttctatatgacaaacggaaaatctgaataataatgtgatatatacgcatctatatgttgccatgagcctcttggtgttaatatcttgtaatcgccgtcatgaacggatagttatctgggattcactagaattgatactatgttgtatccttagtttctactactctcgttaattcccaagtttatgctataaatttgacatttgtcagatctacgaatatctccgtcacacacaaccaatagtaacatgaaaagatatctaagtttgaattacactccagacgtattaccacggatttcgagttgtcctcaaagaatgttaacaatcgcagcaatagagcaagcattgaagtattactgtatttgcttctatcatttgaagaagagaacggtttttaaaataaagggtccatccgtctgtaatagccgtaaatttcggatcagatgtttctttttttcccttccgttaactactcatcgggtaacggaaagaacactattgcatattcatattctatagctcgctgaggctcgctgaggctcactaccgcatctatcccggtattcggataaacttaacagcaggaggctcatcctaggagctttgcagttgatggcatgacctagttagaatcagccaatgatatctatgagaaatacgacgaaaacattaaaaatattttatttttcatgagttcgaggaacgaaacagaatccgcttatacgtcgttctcgcctcttcttcatttccatgtgtcagcatctacttgaagcaaaaaaaaaagaagatgctgagtgaatttcgccgtattctgcctctttctgcaccaagtatatctcattaaataatcaggctctgttgtcatggcccatatgctttagcaaagacggtgatggaaaaaaagaacaaaataaaaaaacaggaagcgtaacattgctatggccaaggcaagtcagtttggttcctagaggtgctacgtaatatatgtatctactttgagctcgcaccttgttatgggatgaaaaaaagggtacaggccaagccatagtaggggtgtgggagtttataagaatcatatataaagaacagctttcaattgcacatcttgtcttgtgaaatcctctgaaatatcttctgccggtgttagtgtttatacgtaggattgggaatacctaagaaaatacagcaaatatgtcctctgatactctaccaaacacaagattccaatacatcagaattattccatctcaggaaggtactgaagcatgctctgctccagttgagacctcattcactgaatataagggtactgttgtgattactggtgctccagcagccttttctccaacctgttctgtttctcacattccaggttacgttcaaaagttgaaccaattggtcgatgccggtgcatctcaagtcttcgttgttactgctgacaatccatttgctaaccaacaatgggccaagactctaggtgtcaaggataccgacaagatcaagttcatcactgatgccggtgccaagttttcccaatctttgggctttgccttgccaattgagtccggcgttttctgggccagcagatacttggtaattgccaaggatgggaagattgtttaccaagccgttgaagaaaacccagctactgatgttacagtttcttccgttgataatgccttggaacaattgaacaagattaaatagagagaaaaataactataatactattaagtagtcaatattaacgtacattacttccttctacctttaacccttagcttcactttgagtagggaggttcaaaacggaaacggcatttttttatttcagtcaacaatttagaaggatagatcaatatataaatgtacatacatatggaaacataaatgtgcaatgatgagaaatacatttgaacaacagaaatttcaacaaaaccaattgtctaatctgtagcatagaaagcaaaacgctttgttgaaatagaaatcattcaaagtctcaacagtttataatatctctttaatccctcctgatcgtgaaactagatccattcaaaaacggaaaaagtagaaataaaaataaaaaggaaaaggaaaaaaaaataacgagtttcgttgggaaaaccctcgagtctgtagttgaaagttgtaatggtaacgtgacgatcgaaggaattcaatctctctcgtgtgttagcccaccaacaaaaaacatgtttacacgtgtggtttggaaactcaaaaaaaaaaacttaccaaaaggttgtatttccaaaacccaatagaaaacaatgcgaaaactgaatcggcttaaaattgccctaatttttcaactatttcattttcgtttcaattgtttaccttaaaaaattattagggcaaaaagaataaaacaaaaacaaattattttctgatattccgattgtaaaattgatttgaaggaaaaagggggataatttaaccgagttagcatttagcattgtagatatgtgcttgttgtttaaatgtaaattagaataagtattattaaagatgagaaaaaaaataaaaactaaaggtaaaaaaatcaaaggtgcactttccgtgtttttcctttgaatcaactaaaaactaatatggtctttgcatttgcatcactcatgtaatgaaagaaaacctattgtaaaagcatttgaacaaaagaagaactcagaaaagatgttttcctaagattttattcctgaattttttgttttatagatttgatatcattaataagttaacttacaacaacaaagcggcagcaccggcgaccaaagcaccagcagctggcaaagccttagcagctgcaccagtgtaatctggttgagtgtgagaagtggatggagctggagcagcagtagaagtggtgttcttttcaactggagcttcagtggttggtagtggacaccaggtggtgtattcggtgatgacgtcgttgacggtgacggtagcagtagagaccaaagcttcagaaacggattcgctacatttgttttcttcacaagaagtgatggtaaccaaagtagtttgggattcggtagcggtttcagtggtgatgttttgagcggaggcaacggcggcaacggcggcgaaagcggcgacagtagagaattgcatttttgataagtatttaagcgagtgactgaagaataatattctatgaggttttaagctaaaaatgaatatagtaaaattattataataatagtgtagaagaagagaaaagaatatattaaaatctgaatggtacctgctgtatatatactcttttttttgcctcctccttgggtaagtttctctatttcagtagataaaaaaaaaacaataaagcagtaatattttttatcatatctcctcataacaggaaaaatcagaaactaaggtttctaaatttgtcatttttttggccacgccccagtggccgcagtacaaatcgcgagatttgtttgtttttggtcatgaaagaaaaaaatgaaaaataagaaactaaaccaaaaaaaaaaaaacgccaacagtgagaacgggctttacaacggacttttacagtgggttctaaaagaggtaaaaactagcccgtagccagcagactggtattttgattacctgtcttagcgttgactggttgcttattctactagaccgcgtggtagcagacaataatgggagaatacgactcgtttttgcccctttcgtagtcaatcctctcagttcctcttcctcgaaagtagaaacgcagcaactttctcattggcgagtattttggtttttgtttttttgtttcggtttccacgtataatgagtggagttttcggtttgttgaaccgtgtttgctttgctagtagaaacttaccaaattttgaaaaaaatttgacaggctaaggctagcttacctgaggctagctagggtaagcaagattttgctaggatttccacctatggcggatttctcgttctactccgtagtgcttacatttctgagtcgttaacagcgcttgccctcaaatctaaaaaatctagaaaaagagttcctagactaatttggataaatagtaggattcgttgctctacctactcctctgcctccccgccacatgggggtgaccgcaaaaaaagaaaaagacaatgcaagaaacaccgcagttacgaaaatctcaggttcacgaatgtgtgcttatgcccgtattgcggtgttttctacgtagcggaaataaatcttggcaaatttatgttcccgttttacaaagcaacgagaattttatttcacactctttctcgactatgtttccagtttcctattctagtatataccagcttactcaccaattattgcttggtatttttgccatatttggcgtcggctggaggcaatattttactctcggtttggttggtttaagaatataccaagaagttggcctttcgaagggatagcttgggatggccaagatcgcccgtaataacccttatagtgctcaaagttcagtaataggcaaataacgcacgcccgcatcgaagatagctagcaacgcatatctatagtaacataggcaagatattaaaaaaatcccactccagatgagaaaaaataaaagatggtctcattcaagatatcagatagcgagcgatatgaactcgaaatttttcaggtagaactgagggggagattattttctacgagcaattttctacgcaatactacaaggcaatagaatccacgaaaaaattacgtagttgctgcggactctttttgttttgatttccgttgttttggttttatagttttgcgtaatcttctatatttggtaccctgtaaaaaggttctagactttgggcatttcactctttaatcagattcgttcccctttgtctgcttgcttctgcaagatggtgtgctttgtttaccctgtgcgatcgcgtttcaagggttccatgatagggctttaaaggcgctaatcacaaatctcaagtatatcgtcgtattccagagtcgcgggttcgactcatgttgagtgtaagtcagatcagtcaccagtagagaaggatgtcatggcttgatttgtaaatagaccctggaaacgccgatagtaggttacaaactacgacagagcgtcaagggcgcggccggtgggttttacctactgcaaatcatctcacggttcgtccattttttctattccatgcctagaaaaccaagaggtgtgatttcccgggtaacatcaagttactaatccgtttctatgcatctattaccctgtctcgtaagttttcttatcagatcacgttgtatgtaagtaggcggtttcaaaccatactttattcaaattgatgtctgtccaaaaactgtcatttcgacttacaaagaaactttaaatgaggaaatgtataattattgatcaagaagtacctttaacgtttatggtcaccagtattaatatgtaacgtcacggtattcacaggtgtgcaataattgggtggtcttctcaagggtttcttacttggtttatcacgtgatatcagtagaagtattacccggatgtcatgtatcataatccgccactgcccctcctgttcgcaaatcttactctacatacatacatgcatacacatataataacccaatctatcaagccgacgtcgatcctatctgtcagagctgttgttacgtcttaaataggaaacaagtacacaggcagtatttcagggttaatcacagaaccaaacggtgataaaatcttcgaaacagtgttttatataattcccactgtgacactttcccctccattatcggtgaatggacatcgttttttgccaggcccttccttttttttttagtgaattagaaccgttgaatttcatattcaagtcgttaaatttaaaaaattgaaaattaaagaaaacttgatagaaacaaaactaggagacccttcgacaacaattgctataacgttgcttaagttatctgccagttcgagcgatctcccaaagaattagattcatatacgtatccttcgttgaaccaaaaactcgaggatatcgaagctggacacgtttttccaattgaaataaaatgtcgaatgaggaatttattaggactcaaatttttggtacagttttcgaaattaccaatcggtatactaatttgaacccggttggtatgggtgccttcgggttggtttgttctgctacagatacgctaacaagccagcctgtagcgattaagaagattatgaaaccgttttctacttccgtactggcaaaaagaacgtatagggaactcaaattgttaaagcatctaaggcatgagaatttgatttgtctcgaagatatcttcttgtcaccattagaagatatttatttcgtcactgaattgcaagggacggatctacatagattgttgcagacaaggcctttggaaaaacaattcgttcaatatttcttataccagatcttgagggggcttaaatacgttcattccgcaggtgtgatccatagagatttgaaaccttccaatatcttgatcaatgagaactgtgatttaaagatctgcgatttcggacttgctaggattcaagatcctcaaatgactggttacgtgtcaacccgttactatagagccccagaaatcatgttgacctggcaaaaatataatgttgaagtagacatctggtctgctggttgtatctttgccgaaatgatcgagggtaagcctttgttcccaggtaaagatcacgtgcatcaattttctatcatcactgatctattaggatcgcctccaaaagatgtcatagacactatttgctcagagaacactctcaaatttgttacttcattacctcatagagatcctgtaccattcagttcgaggttccagaacttggaaccagatgctatagatcttctagaaaaaatgcttgtgttcgatccaaagaagagaattacagcagctgatgccttggcccatccttacctttccccatatcatgacccaaccgacgaacctatcgcagaagctaagtttgattggaatttcaacgatgctgacttacctgttgacacctggcgtgtaatgatgtattccgagatcttggatttccatcaaatcggtgacccacaaatcaatacaaatgctactttcgacgaccaagtagccgctgccactgtcgccgccgcggaggctgcctctaagcaacagcagcagcaacaacaccaaactgaagagcaaactcaacagacaatcgcctctactcctccccaggctcaagtgaccccacaacaacttgaaagtggcgctaactctaattccaattctaacccttctttctctattggccctgatccagcaaacgaaacattgacgaattttgctaatcaagcagaccaatacgtctccaaattcaaataagttcaatgtaatgaaatctgcttgacagaagtatattctttttttgtttttatttcgtattatataaagcatcttttaatcacagcagaaatgtaactatttacacgtttcttacgataaaccgaatattatttataattctgatagggcatctcaactaggaaacaattgcttaacaaaattattacaaaagtacttaaataaacaaaatctctgttatgataatacaacttgagggggtttcactccgttaagccggcttcaagacataacgaatagaaaatagaatccttcttctgtaacaaattctgaggagtgtcgaactctgttactctacctttatccaacactataattctatcactgtccataattgtgttaatcctgtgagcaattgttaagattgttctttccttaaatgcgtttctaatcgtcttttggatcaattgatccgtttcaacatcaacagctgcagttgcttcatccaaaatcaagatattacttgaaatcaacaaggcacgagccaagcacatcaattgcctttggcctacacttaaattactaccaccttcagtaagcatggtctccaaaccattagatcccatacccagtatgtgatccttcaagtgtgataaagccaatgcattccaaatttcttcatcggtataccgattagtaggatcgatgttttctctcactgtgccttcaaagatttgagaatcctgcgggataatcgacaatccatgtctcaaatcagccaaacctatagaatcaattgggataccatcgatcacaatatgaccagaagctgcctcgataattctgaaaagggcaagtgtcaaagatgactttccagcacctgttctaccaacaataccaattttctcctttgggtgaatatgtaaatcaatgtccttcaaaatcaattctagttctggtctgtaacgggtactgtagttcacaaactttatttcacctgattctggccatgatgctggtggcctatggtctttaataatatatggtgcttcgctcttcaattctgcatactctttgattctttcaacactaacaatattagtttctacttccacagtcattctgacaatccaattcaacgattgagtgatttgcaaagcaaaactcaatgatagaccaatcataccagcagttagagttccattaccaagtctaataacagccaacatagatgcagccaatatgatcacggatccgataaattcaagtctaaatgccaaccaacggttagcattgacactaggatagaatgcgctcatattattgtcaactctggtttggttgatatgtacaaagcggttctgttgagaatacccacggatggtagtcaacccccctaaggtctcttggaagtgcgcataaatgggtgacctagtaacagaatccaaccgacgcaattctcttgaggttctcaagtagtactgttgataatagatgtacaatacactcaatggtaacacaataaagataaattgccaagttgccatgcaaataacaacgatggtgaaagagaccttaacaacatttgcaaagaattgagcaaacgttctacccaaaatttcatctaccttataaatatcattcgaaaacctgtttagaattcttccaataggagttgtttcaaagaaagacataggtgcctttaaaacacttgaagccattgcatcatgtaaatacttggagccatggatagtacagaatacccatagaacaatagtctgtattaatgttgccagagcggaaccaacacctaaagctaagtaaatcatcaaatatcttgtggcatgggggttatagcctttctcagtattgacttctgaccagtgtttgagccagaaattaccaatgacggccaacagcatcgagaggattaggaaacccaaaaacacacacacgttgcgggggttacacgcacgggcgtactccatataaatatcccatttgactttaccttgttccctgtgttctcttctggcgctattttcattgtcatcaaaaccaattgagcctaaggttgccaaagaagctcttcttagagattttaggtcttcagcttcagataagttttcggtgtccaactgatttatatctacggtaatttcagagatctttgagtctgaataagattcaattccttccgacgctaattttgccaaggaagtagtagattgggaaggagttggtttacccttcttcccaaactcggcaataagcttcgatagtggagagtttgttgactcattaacttgatcataacttccctgctgaatgatttcgccgttttccatgagagtaatggagtccgcaatggagagaacagtaattttatttgttgctaacacctttgttttggaatgcaacaaaccgtgtggacccaaaacgtgttcaatcaaatgtttagcgacatgctcatctacagcagcgagaggatcgtccaataagtaagtatcagcacgagaataaacggcacgggctaacgatagtcttgctttttggccaccagataaagaaatacctttttcaccaactaaagtctggtcaccatctggcaacatagagagatcaatactcaaagcacacgcttttatagtcagctggtaaaattctggatcatacttgtgaccaaacaagatattatctttaacagtaccattcataatccatggaacctgtgaaacgttggcgacgtcaccgtgaacagttgcgaaacccttcactctaatcaaatctcctagtagactttgaataagtgcactcttaccactacccactttccccacgatacatgttagttcacctttcttggcaacaaaatttatgtttttcaaggcaactttatattcaggtttgcgttgccataagaaagttgcatcgttgactttaacaccttcgtcaccaatattctttacttttggttcacgtaaaacggcatcattttgcaactcttcgttagtcaaaaatgcaaagagtctatttatggacacagatgcttcaataaatgaagagattgcattaggaacaacagcaagagggaatgacaataaattgaaaagagttaatgcagggaagactagatcagtggataatggtctttcctccgtgtatacgaaaacagcaaaggtagaacatgacacaaggaaaggcacgatattgaactggaaattagccaatgctaatgtacatcccattttcttcaagttcttcaattctttctcgttcctgacatgatccaatttggccttgtatgggatttcccacccgtaaactttcaaggacttaatattgttcaagatttcggaagtgactctagttctttcatctttgttcttcatttgaattttctgcaattttttttgtatcctcacaataacagaatttatagggatcatgacaatcataatgataacaccaacccacatgcatggacctaaaagcttgtatagagaaaccaaacacaacacaatttggaatgggccggaccaaataatttggccccattgagttaaatcctgtaatctttgaacatcaacactcattaaattaacaatatcaccggtagatgaagaagccgatgcttcatttgatagaacaagggccttttgatagattacagatgtcaaaccactcttgatattcatccccgtatcgaaagcgttcaagaagtattgatgcaaaatggacgtttgaactacacttacaaagaacatagccaaagataacatgacacctttgactaaaggaagttctggctcaggtgtggaagtataatctgaaacgaacttgatcaaaattcttaacaattgaggttgggtgaattgtaaaatatcataagcaactttgaaagtaccacctaagagtaatttaccaccaaacgtagttaacatcgcccaagataaagatggattggccttgtgtttcaattgatactgccagcgctcgccgaatttctcggagatttcttttgagccgaaactttttggcaacttgtataaatccttctcagtcaaatatttcttgtaacctgttttcatcaattctgtcatccaactgaaacttaatctttggaatatatgggctgagtccactggattacgtttttgcttagaataggattctatgactctctgataagaaggcaatggcttttcgaataatgattccaatagtaaaatcatcacagcagagatggtctggaacacagttaaaatgtacacggaatatgacacgggcaattcatgttcatcaccgtaagcatgtctgatactgaagttaatccatttggatccttgaaataaactttcgaacaaccaatagaagagaactaccccgttagaaatccttgatctgtggtactccacccaatgtaacattaacgctacaaatatggataagagagttaatgtatattgggaagttagtgttacactttcatgtttttcgctagaatagtaagcggacattgaagtgaataacaagaaacacccaactaacccgattcttgagagcaacaaccaatcatgtttgtatttcacccctggatgctcagctttactcaatttaactaactgataggtaccaaatattagcatgaacaacgctgcaaaattcaatagtacaccgtcaataaagcaaatggtaaagtctccgaagtacgatataggaccgaacccctcatcatcacggcataaccagcatgcggtgctatttccagaaacagctgaaatcatttctgaaaccgaaaccgtttgaaacatttcgcaatcacccgtgggaccataaattgttttaatgaacgtaccagtcttcttgtttaacctttttttttcgattaagtggcattttatgctttgtcttatatgctgttctttttttttggaatttcttgtatctgcttcgtagtattacaaatataataaaactgacttccaaacactagaaaatctgttcaagttcagctgcttatttcggagctgagccatgtcaagctatttactttcaaacgactactgagcaattggcttgtagacgcaccaatgcgtagataactactctttgcaatatctttcctccggtgaacaacttggcctagtgcatttcagccctagacaaatatggctacactcatttcgacatgtttccaataaggtggtttcgtggtctagtcggttatggcatctgcttaacacgcagaacgtccccagttcgatcctgggcgaaatcatttgtttttttaattttttttgttttttaaacattagcagttcccgtgttctgcatttgtttacgttttcagacttgaattttaaaatcaacagtaacaattgcaattaatcacgtagaccttacaaatgaaggtgctcatcggtagtttttcttactccctttagattcattaccatctgttttgatctccgagatacttaaagagaatcaactaaatacttcatggtctaaatcgttcaagttgtatcctctaaaaatgtcaaattttcagctcacggagtatctttcctcgttccaatccacagataaatcatcatacggagcccttgaagcacctggttccactctcaatcaggtaacggatgttttagctttaaattcagagtatgaaatagcagatgaaatctttgagacactaacagatttgactcactcgtatctacatttgaactataatgtgaaacaacaactggtatatttggtgtcctcgtgcctatcaaacttatcagcgctgatccaatctaactttcaagtcgatgaagaggtattgctctcatggaagatcaacctacaaaaacttggatacctggtacatgttttgttgattttcattcaagatgatttgttaaatcgaactcagcaacagcagcaacagaagaaagaagaaacaaagctatactcctcattactcgaaatattgctacctagtatcataaaacttgcacagataccacagctaccgaaacttttcggaaccttgttggaaagagatctattcattggtcttttcttgaaaccgcttttcacgttagtcgaatgtgaatcgctaatcaagataaatcaaatcaccaccatgataattagaaccatagctatatttgtgaaaaatgacaaccaatcgcaactagtacaaaacttcattatggccaatctaacttattttcctcaacttacaaattttaacgcagaactattgacctatatcaatgatgagttcgactatcctcaacttaccgaggacatcttgaggaatattagtaacaaggagtttaacgcgaaagatttgtccggaccaaaatctatatctaactttttaatcaagatatctgagttatcccccagaattgtgctgaggcaaatgacgtcaattataagattgttgaataactcgtcatttacattgcgttgttcagtggtcgaagcatgcggaaatattgttatagacattgcatctgaccctgatctataccaacattataaacagcaaaatgacactttaattgaactgcttgaagagagattccaagattcgaacccttatgtcaggtgtaaagctattcaatcatgtgtgaaaatatgtgacctcaaaattaaatttaactaccatagactgttaattacttccttggcggtacgatctttgcaagataaatcatcattggtgagaagaaatgctgtgaaattgttatcacagttgttattaacacatccatatgatcagatgcacgggagtcaattaaagttacgtgattggaagcaaagactgcaagatctagaatcacagaatttcgaccctgacgacgaaaaagtgaaactaactcgccaatattataaagatgccatctcttttattgactcgttgcataacgctatcgaactctgtgtgcctttgctattttctcggaataagtctgaagtactagaaacgatggattttcttgtattatgtgatgctttcgacttggaattgagttatattggtgtcaagaaaatgttacatttggtttggttcaaaaactctaatgatgaaggaacgaacattgcggatcatttagtttcttgttataaacagctatttcttaccactcctgaccattttaactataaagaaaggtccgcattcatagctaacaacttaattaagttgacactcgatgcatccatatcagaccttgcctcactagaaagactaataggattaatacatgacagcaaattgattgattataatgatatcaatgcgctctggttgatattccaaagtctgttaactggagggcggatcggcacaacagaattttcctcttctcaaatccatggtgcaataactgtgctaggaatgttggctcttgctgataatgaagttggattacacggcctccctttcattttaaaggttggattcgatcatggcaatctaccaataatcaaaatgacttgcatcgttctgcaaagaatggtggcacctgatcacactgaaattccacaccaggaggaagtattgaagaaccttcacaatctcgtcatttcatcaactgatgaccatgattactactcaatgtgtgagcatgcaattaacgcaattttcgaaatttccgaaagacccgatattatttgcaataccttaataaaggaaaagactatgataacttttggcgagcttcgtaataagaatattgagcattcaagatcccaagcaattgttgagtctagacttgcttctctttgtcagttattattcattgtgggacaagtgtgcattaaggtaatagtatttctagaaaagagtgaagcaaaattcaaaaaatccaagatacaattcgaaacactgaaatcggcagctaatgaaaacaataattctgatcctgatgcttctgttggaaataccacagaacaacaaaaggaattggatctcatcggaggtactaacgaagatgatttctcagatgcgattcaatatattaaggaaaacgagctattatttgatcccaattccttactctctaaatatggtccattggtggaggagattgttacaaactatgataaatttaatgataagtatctccagagaaatgctgttttgtgtttgacaaaaatgatgtgcgtctcatctaggttctgcgagaaatatttatcgcttctaattacaattatggagagatcacccgatcctattattagatcaaatgctgttctagggcttggtgatatggctgtttgcttcaataatctggttgatgaaaatacagattttttgtaccgccgtttacatgatgaaaacctcatggttcagaaaacttgtttgatgactgtgacatttttaattttagctgggcaagtgaaggtcaaaggacaattagcccaaatggctattctcttggacaactcagatcaaagtataagtgatatgtgcaaactcttcttcacagaattatcaaccaaggataatgctatctataatggatttattgatattttcagtggtctatccaacgacgagaatttgaacaaggactccttcaaagtgatcataaaataccttctaacgtttattgacaaagagcgtcaccaaaagcaactcagtgagaaattgctgggcaggctcactaaagctgaaaaccagaaacaatgggatgatattgctttcgtgttaaaccagctaccgacaaaatccgagaaggttcaggaagttctggaggaaggattcaaactcgttagtgctagggaatgagaagtagtccgataccaagctagaactgtgaatgctttgatgatacaattaaatataaacagattacgatacaaaaaataaataatagataatatctacatgagaagaatagaattaaataggagggctcgcaaatgttattaacaaggatgaagctgacaacgtcaatttactaatggaatgaacgatagtaaaggatgttgataaaataataataatagtaataataataataatcataaaatgatagttcatagtcgtaagcaacgtgaaaaaaaaaacattgatgtaatgttatagtccaatttctgggaaaaagtacactcaggatatagcagttctcatcagttcagcttggttggattctcagcaaacacttcagctgcagaaatgataggatcacttgatttacccaaggtgaaatccaagctcaattggttagaaaagcgaggaccattgtcaagatgatttttgaccaagtcgaccatacctttgatgtaggtttcactaccgtttaaagagtcgcatcttttgatcttgtccttgtacttactctcagcaatgatacctagatctacttcatgcaaagtttcaatatggtccgatgtgaatgcgattgggacaagcactaagccaggttgagttggtgccaaaaactcagtgatatcagaggtttgagcacctaaccatggctttggaccaacctgagattgccaaaccagtctgtatgggtttctgaagttaagttctttcataacgtgataaactgtagctgccacctctgcagggtacgcatcaccggtatttacaacgtccattggtagagaatgtgcagagaataaaataacagcattatctctaatttcagcagggaactcttccaacttcctggtgatgttttctgcaaatgctttaatcaaaccgggttgagtgggccaacggtcaatgacagaccaggagatttgtctctccggatctaagtttttaatttgtctccatagttcattaatggaggaaccagtggtggaataagagaattgcggatattgtgaaaaggcaactgctctagagacgccatctttcaacatctgttcgtaagtctcatgcgtcaatggtcttgcgtatctaaatgcaacgtaaggcttgtgaggagcagtctgtggatgaatttcatccaacagttcacagactcttgcacattgatactctgaccattttttaatcggagaaccaccaccaatctcttcgtactgtttttcaatcttcggtgtacggaatctagcaatatattttgcaatgataggctgatatttggcactaattggaatcaaatcgtagtccgagaacaattggtataagaaatcataagtctccgaaacctttgaaggcccacccatattcatgaaaacgataccagtggggccctttttggcctgcgaatggaaacgatgcacataatttctcagtacaggcgaacaaaatgcactattcctatttcttaaagctgaactgatcatcattgcctagtgtcgaaaaaaataaccatccaaatgaatgcctacttaatttttaatgcgtcaaggtactgctatcactattaatgcccccaaagtaaacgcttaaaaggaattccaatcctgatatatataaataaatccccagtgactaaacagtaaatcttatcagcaggtaaatctctcgtatgtgatgcaatgcaaaatggataaaataacccaccacttaatgtttaaatcaaacttttattcactttcttccaaaaagcactcctgctccgcaatgcagaaagtgatgtaataaataccgaatatcaatgccaactaccagaatcaagaattggattacttacccaccttacacgaagtatggaaacaggattcccatttcacttccgacttattgatgaggcaagcgattcttcacttcttgctttttgcttttggtgaaatttcaccatcaactgtcatttctttttctcgccaatcgttcctagaagaaactaccgttcgatgccgtgggaaggcaatgccaattacgtagcagtaacggagcttgacgcctatgtttaggtttagatttgtcatgcaaactgcatgttcgagagtcaaagtcctgttctgttcaactgggtgtatcctatatggactgttggatcaataatgactggtgcatagatttttatttactgtttgttcttcaagggtggatcgaccaatgatgcatctgcaggcatcagttgaaatgatttgtttagcattgccaatgtagagattaactcaattgactgcgtagcttaagggtttgttttgagcgatcgtatttacctatggatcgggggaagattatctctacttcctcgcatctcacaatatatagtgaaacaagaatgtataaaaacaaggatttagtgacgaataatagactcgtctaatctacagtaacttaaagctatcacatgcttcgttaatgtcatcaatgtataattcgttcacctttcccttctttctgtatggaatcctgttcaacacggaaaaatgttggaaaaccgaatttttttggaaacagaaaaacctttaaatagtgtcaatgcctatttcttttaaatctttgatccaatacatagacagtaccccctgagtcttctgaggctgttgattagtgattgttagttccaattacttaagtagtcaccagttttatagactgaaggaaaggtcgtcattttctggatgaaataatggtgtacaatcctattcatgcaaagttagaacagctttctgcaaattgtggtatagatgaagttactttgaaacttgcgatctgtttgtttgcatcttttccattgaatgggatcttgaagagattaccagataacaacatccggttgaaatgttatttcatagttgctatctcagctttctacatctttgggatattaaacctgtatgatggattcacgacattgttcattagcacaattttcacattcgtagtgactagatattaccagtccacattcatgccgtatgtgaattttgtttttattatgggccatttagctataaatcacatgtacgcccagttttatgccacatacgatccaacaaagatcgatatcactggtgcgcagatggttcttgtcatgaaattgacatcgttcgcttggtcctattatgatgggactttagctgataaaaaggatttaacagaatatcaactgtctagatctgtgtcaaggcatccaagtcttttgaaatttatggcttatgccttcttttatccttctttgttaacaggacctagcttcgattatgccgattttgaatcgtggttgaattgtgagatctttagagacttacctgaatcaaagaaaccaagacgtaagtggaacaaggatcctaacttgagaaggcagattcccaagagtgctggtgtagcccttgtaagaatcgctcaaggtattttctggttggtacttacctttttgatcaaggattacgtctataccgactacatatttaccgatgagttcattaacgtgagaagcttcttctacagaatccactatttgttccttctaggattctcttatagattgaaatattatgctgcgtggaccatctctgaagcttcttgtattgtatgtgggttaggttacaacggttatgacacaaaacttaataagatcaaatggaaccgtgtccaaaacattgacatttgcagattggaattggctcaaaatacccacgaatccctggaggcttggaatatgaataccaacaaatggttaaagaattacgtctatctacgtgtggctaaaaagggatctaagccgggtttccgttcaacattattcacattccttacatctgcattctggcatgggaccagacctggttactatctaaccttcgctactggggccctgttccagacatgcggtaagctctacagaagaaacttcagaccaatattcttagccaaagacggtaaaactccattgagatcgaaaataatctacgatgtaatctccttttatgtgactaaaatttcctttgggtatcttgttcaaccatttgtcattcttgactttaagaaatcattatatggatggaaaacggtcaatttttatatccatattggaatactaataactttctttgcattcaagggtccattcagtaaacagtttaccaactggttgaagagcttccagccagtgcaaatagaattgaagagacaaaagaaaatggagaaagaagtggcagcaacttcgggtacccttggttcagttatagccgataagcacgaatttgagcgcgatgaattagaaggcgagcttgagcatgctatggatctaggtattccttctgttagctttgacaaagaacaattcgataatgcaagggaagacttacatgaattcagacgtcaatatgaagagtggagaaacgagaagggtttggaagttgaagaagcgaacttgcgcagagcctacgaaaatttcaccaaacaactccaaccacagcacagaagaatgagtttcagcgattattcaccaacaccaattagaaagaaagaatagctccagaaatctttatgactgaatgaatatacgtttgaagaattacagtgttaatctatattttggtagcatctttatagttaatttcttacacgaataataataattttatgatatacctttataagctctctctttgtattaccgtttatcgaaaaccagtatcttgccctaaaattcatctgggttaaaaaggtccaaatctagatccagctccaaatccgggttttcttcagatttcgtctctgaatcctctttcccatttgctgtgaactcgaacgaacctcttctttcagtatcttcagttgcatcctgtacttgttctttgttattgaatctatcatcaacagaatcctcattggtgttgcgcatttcatcaattttactagtattattatcattattaacattatcctcatccaaagcgtcaagtagtaattctttctttttgagagaagccattgccaacataccttttctcaaagaatcctctgctggccatataaagttattcggtccaatcattgatttatcaaaagtgggtgggaatcgggtgaacttagccaatttcattgcgtaatccaacacgactttggaatgaatcttctctctctgttttaacatgactttttgttcaaactcaacttgctccaacatgggcagttcattcaacgaattatagcacgtattcaaggtctccaatatttctcgcgttttgttgtctatatttttctgttccttatccagcctgctcaactcttcctctatcttgtagtattcatcgaattcctccaatgtttcataaagtttcttatcacactctattactttatcgatcaaactgagatcgggcttgaaagtgtccacacttttactcaattgctgtatcgtctcttcatatcgttctaaatcttggtatattccgactgactgcagctcttcacttacctgttcttgggtcttgtcttgagccgaaaaaggtagcgtggctaccgatgtcgacgagggtactggtccaggagtactcatgataacccggtactttttacactgtttgtaagatacactaagggctaccagctatgtcgtcttcggttcgcaaggcttcctttgctgattcatgtcatttaagtgaatgctttaaatgttcgaactttctgaacaatggaaaatgcctgtttacatgaaattcatttggtaagaatcaagaagacaactaaataagatgctatgtcactgaatatcgcttatgtgctgtatgtactgatctagttatggtgctgcgtttaaaatgtggtatactctcttcattgatggtcttcttccgtgaagccaggacaatgcgcaaaaaggtcagcatcgtctttgtacttgttaccacagtagaaacaataccttagttccgttcttagaaatgtgtttaatttcttgatcttctcatctatggtaagttgttgaagcatttccaactcaccatcaactggaatcacatcgtttgatgattgttcagggtggtcatggttatgtccatcatcttctgattcatttcctagacttttatgcgttaagttctgcagtaattctatcacatagcttcgccataatacgttgaaatctcttggatcactggaagagtagaagttatcaacgtcaccagtcaatgtgaaagcaagtttttgcatgtgttttaataaatggagtttcctttcagtatttttctcgttattaatccgttccctaaaatcatccacattagcgacgtcctcagtctcagataacgctggtttagttcggataccaattctatctagtttacgttctacaggtaccatacctacggtacgcttagagccagactctgctgtttcgtcaatgttatagcccatacttttcatcatcttcaacgctttcggcagtctttttgccaatgggatgtcagatgctcgcagcagaggccctattttatcaccatgcaggccttctatttccatagtcaaatagttttcttcccaaggttcttcatgagtgtcctcgacactcgcttgatctctctcacttgcagtgctctttgcatgacttaatttccctgatttcttcaatggtctttggagtctttcttcatcactagaatcatcaccatcactcagttccgccaaactacgttttatcatagtaaatgtacccctaaagtggctacagctctttaacgggatgacactcttgagatatgcaagttgtcatgttgatgttaagaaatcctgtcataatgaagttcacactatataaatcgatgtaggtatagaaagtgaaatgtgtaaagaaaataaaaccgttaaataaactcagatcacgggaagtccaggttagatgtctcttttagatatattttggttatgtataactggatcccttttgtgttatcattcaaagtcattagtgatttctggtggttcaggaattccgtcatcttttagttgctgttctagttcttgctccaaaccatttttccagagatggtgattctcaccaatgacatatgtcatagttctgttcatgtagccctccggtcccatgtagttcaagttttcaatgacatcttcaatgagatgagctttgccaacagcgataccgtcacccaggcccgaatgtctgacgttaacgatgtgaatatggaaatggtagtatgagggttggtaatggataaagagtcttagttgatcagcgggaaccaagtaattgtagcaactaggaaccacagatcttatcttattcttcatatcgatcaaccattgttgatgttcgggtctcaagtctcttaacgatttaatatcgtccctatgtacaatagcaaccaaataaagggcatccatattgacaccatcccatttcatatcagggagcaccacaaagccgtctttggggctctcttggtcgaagtacttgaacacgaccctgtcactctctgctccgttatacaagatgttctgaacccattgcaacctaccgttattgaccatatcatccacataaggcttcacgatacgcttatatatctctggggtttccctcaccatatggcacaactgcttatcgtacttctcgatatgaacctgtgtggcaggccatatcaagttgatctttgccgtggggtttaactccaagtcctgcttcatcacagacatcccccagaaataaatgtcgttatttgctattggtttcaacgtctgaatggaattcatacaagaatattcagattcacattggtgcaacgacaacgtagacgaattgggattgttcaccactttatcaaactggaagtgtgtcttctctagagtcacgatagcatcctgacccttaatcgtacctaataatgaaatttgcttggtttgcggattagagttcaagaccctgctaaatcgaaactcatcgatcaaagctctgaaatcaacggcatctgcatcattgtctcccatattgtctattcacgagtactacaataacctcaatgtatctatcgtgttgtataccgacttgtaaactctattttactttactttcttacatgatatttccctcttcccttaaggaagatcatctgctttttaaaggtttttcatgttgagaaaagaatcgttcaagtgcaaaaaggcgtattgatgatgatgagacatacgttagtcagggcacattcagagcaatactgagccaatatttgtacatttttttgctgaagtttatacagggtggaattatatacatatttaagtgtacataagtgtatcgatacttctgtacagcgaatacttcatcttaagaacatccaccacaataagaatacgaaaaagaatgctatgatcgcaattggcgcgtactggctaatcaataggtcgaagttgatcttttgtgcggaggctctgtactttttagcgtcttgtcttagggacgcactcatatcactcatcttatccaaggaatcacctctgtacaatagatcttcgatgttttttgtcatgatttgtttgacaccttttagatcctgattcaattggtccatgttcccctgtactcttttgtcgttgtaaactttcttggtcttttgtaagaagttgtcgaaggatacgaactcatacggtctaacgttcgatttcgagagttgtcccccgtaactgtgttcgaattcttgttgtatatctgccaagtatgagaatgccaaattacgtggatagttcctttctgcgaccacaatatagaccacggtgttcaatctgatataatggatctcgaaatcaccactttccactgtagcctcgtttgctgacgtcggagtgaatcttgatattaggatcttcaccttcttcttttgctcttgtaaactgggatcagtgtcatcatccactgaggcacacaatggtaacccatcttctctgaaaatcaacgtagaacgaatcatgcccgtgcctattgccttgtaaatcacttgctaaaactgaaagatcgttcagtgcttggtacagggcaatacgttttctaatttgctgaagtttcattcattagtgatggaaacttggttttgattcgattgatttcattccatgttgaaaagacgagtttaaatcgaataacgtggacaaatacaaggctaaaaagtgggagtatgaaccccatactgactagcatggtgccctaaccatatgagggctacgagaatggaagaacgtatctgccagagacggtttcccagctgtttcttctgtggtgttgcgcttaatgattcggtcctaacacgtattatttaataattaccctgaaacaagagtctctgtcagattcacaattgaaccaccgatcaacgtgtatttcatacgtggccgcacgttcatgtatccttcaaactgaccacagctggtaagtcacagctatgtgtcttgtgtaccctgttgatgaaatcggtctgagaaacagtctatatatatagtattaaggaaccgaagatgtcagactttatcaagaccgacacctcaagagtaggacgtgagaatcagttgtattcaagtgtcactggtgctagactcgttgcaggatgtataatactggatgaaagccgagagaatgtcttaatggtccagtcatccgctcataagaagagatgggtgttgccaaagggtggtattgaaagtgatgaacctgactttgagtccgctgcaagaagagagacctgggaagaagctggtgccacaggcgatatagtgaaagcacttggttccattgaggatatgagacctccaaaggactggaacccagatttggaagcattcgagagttcgaatgacgaaactgttaacaaatggcctcccaggtccgaattccatttcttcgagatgattaatgttaaattggaggacaattatcctgaagtgaagacaagaaaccgtcaatggttctcctacgaacaggccaaagaaaacttgacccgtgccaagaggccagagctcattgaggctctgaatagaagtagcatcaagaaaagttagcattatatataacatagagtatgtttataccgaagactattattatttacctccaaagaaaccagacatcatatcttgcaagaagttgattggtttctcgaccttgataccgaagtattcttggcccaagaattgtagctcagagttgtatttgttggcaagagttgagtattgtgattttagattctggaaaagaatagtttcttgagtttgacatgcgattattaacaactgtaaaaagttcaacgattcccacgatgagaaataatcaatcttatatgggcctttctctgttaactcaaattttacatctgtcttgtgattggtaaaccgttttaaaagttctttagatccctccaatgcatattcgatattgaagatgaacaaatagttgaatatcattcttgatatgaaatcggggaaactggagtcctcaccggattgctgataccagtcccaaagtagatccacataccgcttcatcgagtcatgagtacctagcactagatatctttccgcttcgtatgtatatccaccttcaagtaattttgtagcgatcgctgaatgtaagtatgggtcaccaaacttatattcactatgtttcacagaccaattgttcatccctgtcactacatcctttaaatttggttcctggccgtcaacgaggacgagtaattgaatgagtctagagaccgaagagtcattgcatggaaccgatgccaaatcgtaaacttcaagtagatagaagatcaaatctgaaccagaaccaccttgcttggacctcaaaaacgcaccggctgcatgagaaatcaaatcaatcgattcatcatactttttggcccgcacatatctattagcaatggttcttaacgtctgatgggcttcataataatcaccagcttcaattctcgcattgaatctctgtaaggtcttcgttaatttatcactcatctctaagtgtctcgatcaaaaaacaattaaggtatgtaaaaactcgcctaacggattcaaaaggcctcttgataagtacaaaataacttgattctgagaaacacgaaagctgtggttcactcgttggacctttacaatatgatcatgttctttctttctcttcctggcgaaatttcggaccgttaaaatattgaaactcaacaaaaccaatattgaaattgactcgttcattaactattctgatgaaagatagggtaaaggacaataacagctggagcagcagctgagctatattgccaagggatttaattacaatttagaaccgagtaatatctgcttagtgaggtgatacatttcgtttttgttacattattaagggaacgctgtcaaacagtagcatgagtgatctcaaagaagctattcagctcatcgatgagaacaaacaattcaatccctcgacattgaactatttcacgaagtgccttggggataaaaatgttggagtaaagtatcatgtcatatctgtttttggatcgcaatcaagtggtaaatcgacgttattgaataaattgttcgatacaaaattcgataccatggatgcacaggttaaacgacaacagactactagaggtatttggttatcccattctgccaatatatacagctctggagctgccaaccaatccattcctgatttctttgttttggatgtcgaaggttcggatggtgcggagagaggtgaggatcaagactttgaaaggaaagctgctctatttgcattatcagtgtccgaggttctaatcgtgaatatgtgggaaaaccaggtcgggctataccaggggaataacatggggttgttgaaaacggttttcgaggtgaatctttcgttatttggcaagaatgaaaatcgtcacaaggtagcattgctgtttgtcattagagattttaccggccaaacaccattggaaagtttagaagccagtcttgtcctggaattagaaaaaatgtggtcacagctaagtaagcctgaaggttgtgaagatacatctttccatgattttttcgttccaaatttcttcggtttgggccacaaggtcttccaacctgaacagtttgataatgatgtgaagagtttgggtgacttgttcgttgaccaagatgcctctttcttcaaagatgaataccatactcacttgccattggatggatggtctctttatgcagaaaactgctgggaacaaattgagaataacaaagatcttgatttgccgacccagcagattctcgtagctagattcaaaaccgacgagattgcagcagcagcatacaacaaatttttgaatgactatcaatcacaggtcactgactccttggatgggaaagaacttgcaacagtactaaaaacattacaatcaacctgtattgatgtcgactatgaccctttcgcctcacgttacgcgaagaaagtgtatgaagaacgtagagatgatttgatcaaacaattaaatacgataatcgacgaaacgataacgaatttcgttacaagaactacttcatccctcattgaaactttccacaagaatgcaagagatagaagtttgaaggggccattcaagctgaaaatacaatcagctctcgagaaagcatcaaggacgttcaaaacaaaccttgctccattttcagaacttgaattattatcttccatggatgcatatatctctaaattcgaagctcgcgtcaataccgaggttgctgatcttcaggagcgtgaacttaatgcgatagtagcgaggttcaataagggtctaactatcaaactcaaggataccatacttcatctacttgctaaacctactatcaatgtatgggatgacgttatgaaagaattcactagtttcttagatggtagtttgaagaagtacactaatgaagacggtaaaatagatttccaaactggagccactactgatgcgaatgacaaaacagagcacacattaaaaagaaatgcttggtcatttttagatcatacggttcatgggtatttgactgaagataatgttgttgatatcatgagaaacgtttttaacgacaaattcagatacgatgatgacggtatgccgaaattctggaaaaatgaagcagaagtagatgcttcatatcgtttggcaaaaagtcaggcattgagtgtattggatgcccttgcaattgtaaagaacaaagataatgtggagatactcatccctgaagctctactggaatcagatggagatggatccgattacgaggagaacggcggccaagaagaagaagaagcagggctatatcatcaacaaaggttttcccatgtcctttctgcattgcaaaaagataaaattattacaaaattcaagcagttcacagatttggtaataattgaagctaaaaggtctatcgtaaacacaaccgaacgtatccccttgtatatgtatgcactagtggttgcattgggatggggtagaatcattactattctcaggaatcccgctacgatcatcttatcgatcattgttcttgccggagcatattttgttcacaaactaaacttatggggtccattactacaatttgccaaccaagccacaggacaagcaactgcggtattgaaacaaactgttcgaagcttggtagtggatgaggaaccaaagagaaagatactcgtcgaaccacatgagtcagaaggagtagacaaggaaccttcgaaaaatgaccagcatttataattacaatattatgtagtaacacttgctgtatataaatattttaataggattccgagataatatcatcgatatccaaataatgttttagcttccatggttaacttccctgttgaacggtggtgaatagaaccttaaaatactatgaaaaaaacagtcaaatggctttagcattctattgaagggtttaatgaacttttgaaagtgcagcctctaaaagataaaagaattgcaccgcaaggtcctttacggagctgtgtggtcatccattattatgtcaaaccaagaagccaccggaagttggcagtttttacacataaataatgatatttcgttggctaaaattacgaaagagtcatcgtcatccatcatcggtgtactgaagctctgcgaggatgagaagttcttacggtttcgtgtaagctcagagcagattccaaaggaattgggctgttcgaatggagtagattcaattagcgaactttataatatattgacgaaaggagtggagggtagctcaattgtagccatggataaaaagatcataatatccatccagagaaagaaggcttcttcagtggaaattgaaacggcaattatcgcgattaccggcgaacacttaacgcaattactattggaatgtaatacgtatcttatgaggaacgtgttggttttaaattacgttcaaaactatacttctcacactgccttggagaaagacagagcaatagagttcctcgggaatacagccaaggactatggtgctaataatgcaattttgagatgggctccagaaaactccctcaactacagagcgttgatgaaatataaaccagagctagtgcttcaggagagtgctccggataaaataattaattcggatgcagtaaatctttttgaattaaatgattccatgaagaataacggtactataacaataaaaagttttaagaaaagagatgagttgaagaatgaaaacaagagcacctacgatacatgggaatccaacttcagtgaagaagaactggatgatgacagtctattagataaattcgatctcaaagatgatttaaaaatgcaagttgccaggctgaagccagcccaaaaagatgctggttcggattcagacactgatctcgaatacgaaagtcctacaaaacgggcgcgaaccaaataatagaatagaatagtgagctagattaatgtattatgatttgtaaatagaataatgccaataccatgccaatggcagtcttgaatcatcactacggtaaatcaaaagcggagcatttaagaatccagtcattaatgaaacttctcgatgctctcccctcaacgctaaattctttgggataaagatattctataacgttagaccaaaaagtgacaaaggtttttaaatagatcgggttcagcggaatggctgtcagctcatcaggtagatgtttccaatcattttttttgaatggcgatcctttaaaaaactctgagaagacagccgtgtaatgattatgaactgttttccccaccgtaacgaaatcaatcatttcatccttatcatatgatgtaaagctcaaatcttcaccatatatatctatcatagtatggtctacggccttgataacagtggccaaaaactcatggtatgcctgaacggccaattcttggaacatctcaccgaatttttcatgatgttggatgtctctatctgaaatagaatatccaatttgttgtgcatactgtggattaatatcactgccatttttcgctaccttctcctgatacaccttagaggcaattaggttagcagacatccctttgcgataagaaaccgtcaatatttgctctgttaatgcccgaagacaaagattcttgtcattggacaataatatcacaaaattatgtaaagtgtttgcgaaatacaagcaacactcaagtatagcgtcatctttcactaagttatacttatgccgttgattcagtttctggaccgccactgatgactctagattggccaaatgtccataaatccaatcattagcagcccttgccaacttacctaaattttggtaatcactgttagatgatcctgaagctgcggattttccagagtttttcaacccatcaagctcttggataacagtggttggtataaggatctgatggttatactgtgtgctcaacaatcttaattgctctagagtattcaaatgagaaacgataaaattagtatccacgacaaagacacttttctttgtcggattttgggacatagatatctgatccgtcggtgctaaatccaagtccataggttcgttacctcgatattcgtgatgacttctatgatctataatcatatcagagaccaatgacacttccttttcatcatccaaatccatcatatcctcatcatgatattcgttctcattgtattttactggcgttggctctccactaggattctggtaatgtgtattaggttcatctaaccccaagttaggttcatctaaccccaaactcttatgcaaatcattcaatgcatacttttgtgctctttcggtacccttggattttcctctatttgcgctagcatacttagagttcaacatgtgaaatcattgaaaagatccaaatctcagttgagtggtatcgagtaactgttacaatgggcctctagaagcacataaacagtagcgttcagcaagcaattcacttgcattattctcggctgaattctacctatctcagttttttttcagatggcgcaagtaaggttttttggtcgagttttctaggagaaaaagtctaccattccgctgagaagagcacaactgcgaatagaaggatcaaaaggtttgtatattgatataagtacatatatgtatatttaaacctctatatataatactagtttaaacgagatgttgaaacaaagtagtggacgttgaaaatattgtgtttgaaaagtgcatcacaaagaccttatatccagtgtgtgaatgtaggaaaaaatggcaataacatcagaatcaaataaaaatgagacctcaaagtaaaagctctcttcgtgtagcccataaactagcacgacaagcaatctttacaatgacaagcctcattcaaaaaaaatattcttctctttagtaaatgcttccttcaccatgttctgtaatatatcgagaaataataaaaccaagaaaaacacacgacaaacgtacactcactgtttgcatttggccagcgtcgttaaaaacctagcagtatgataattattgatggagtggagtgttaataaagaaacagatagaaaaaaatagtgaacagtaaaatcaatagtacaagcaaatctggtagtgagtttaaccaacagacaatacgagactatgatattcaatttttttgtaacatattcctccttaacgcaaacgacgagcttcacgttcggattccatcaagaccaagatgtcaccttctctgactggacccttgacgtttctgacaatggttctagtagtgtcttccaagaattcaacacgaacttgggtgacaccaccacgagaaccggtacggcctaagaccttgataactttagctagagtaactggggttttggtatccattgttgcttgatggttcttccggtaacaatactaacactaactaaaacaataaatatactattcaattgtacagaagtgatgttgaatgtgctaaatatttcattggaagcttttttttcttcattgaaaagttttcgatgagacacatacaaaaaatgaaaaaaaaactgaaaaaatggaaatgtcgcttgggtaggtttggacaaggtcatattatacggaattcctaaagccaccgtcgctccagtctgacactatgaaggacaaagctaggtgagagtttatatacatgtaaagacttattcatggtctgaactatatttattagctatttaggtgaatgttgaaagtgaggagagacacatgtgaaatatatttaaggccattctgcaaggagattaagaatggaattgtttgtctcttatgagtttaactagtgcttcttctggaagatgtaacatatctttgatttcaccaacgaacccagtaatcttttccacgtcgttctggaaactggactgaagctctttgaacattgttttgtatttctcagataattcgttaataatttttttgttcatctcaccgttaattaacgagatctttcttgtcaattcattactgaagttcatcacggagtgataaatctgttcctgtagttggtttgtaaacgaggtctcaaacgatgggaatttattgctaccacctgaaatagtggtgttttctgcggtagcagtagcagctgcaaacatcgatatgtcagtatgagacgattctgtaattatggatttgtcgttaccgattgtgatatcatcagatcttgtgtcatctgcagaattaactaattcattttctgccgctacagtactaacatttgcaccgtttttcttgttaaagcagggtttttgttcgttacttgtcgtggtgagaggctttttcacattttcttccgcagcgtagacttttctagatgaccttgtgattctcttcaccgatgaagtggtgactggctgtctcttttcaacttcctttatccgtggttctccatgctccgaaagggcaaatatatcttctttctgatcttgtaccttctgcctcttgttcttttcttctgtactctgcagcacgatggcctttcttttgattgatattttattattgttggcggctaacatttttgattttgcaggcggtacatcttgagagggcacatatacaattggcttgaaattattcaatacagtttgcttgcttttatctaccttctttttattgccccttggcaatggcagggcaaatatgtcatctagtatcgatacatctttcttctttgttgtcgtcgccttgaacatatctgtcacttttttaatcttaccgctattccggtcaacattcccaaccttcttattgtgtacagccatagatgtgtcttttgagatgtgtgggatagcacataatcgagcaagagactcatttacaggttcttcaatatcttcttggcaagaagataatggacccattggtgcctttttgttaaaatcttcctttaaaacttccaacgttttcgacgttgccctcactatctttcgcttctgagctatagccaaaggagattgttgatcatgttcaatagaatcatcaaatatagaaagtttcaatttccttggggtctcgggttgttgggatgacgatggtaccatttcgggtactggtggtttctctactgtgtcgtcatgtggtttttcgggagtatcatagtgatcggtaacttgacccatatgaaacgaactattagtattatcaccattttctatcgtcatcaagttatcaccgacacttggttctggctcttgaatagacgattcaatgattccatcatcgtaggacgatggaaatcttaatgaaatataggtctgtacttcactgatcttaggtaatttagtagcattccaaatcaattcactaacggcgggatcgtggctctgaaattggaaagacgttgtcttgttaagagttgctaaccatgctgaatgaggggacaggacacagtgtgaaaacgtgtcagtcaaagtaattttcaatgtgtcccttaaatctctcacgatatctactttctttggattgatttcgaagaaaaggccttctccatcccaaaagtataatgaatggtgtatcacctgcatatatgattgatgcttggataacgtttttattccactcgattttcctgtgatataaacggctttcttgatggaaccgaaatttgtgaaaaagctaccgtacctttttaaaattaactgaataattgcatcttctccatgcttagcacggtgaggataaagttcatctgaaaagaaagattttgttttctcaggttctgtccatagttttggcgccgaggataaagttgctcgtatattatgcttcttggggaaacaattgattatcaattcaattaagtaatttgccagttgaaaactgttcaaggaatccaaaatttcccctaaacgataattgtacacctcccgtaactgtttaataataaatctccgaatgtctgattgctgataaaacaactctaggagtagcattattgctttccagttatgaatattatctcttgaaattccatagttcaacaaacttctggtcaaactttcaagcccatcacttttccttggaactttgatttccttggttgtaggtaccatacgatacaaaaatatgctgttagtacatgaactatcagggacaaactaatgaacttatttcacgaaacatactgccaatttgaaccaccatctatctgatataaacgatctctgatttagaatctgtccaatatgaagaattacttcgagaataccatactctaatgaaaaccgtggtctgattgccacatccacaatttcttcgaataaaataccacattgcttatcgacggataaaccacgattccttgcattgttccaactgtcaacaacatccgtttgagttgttcctggtttctcctgtatataatcaaccaataggttaatcacctccagcatagtttttcaactctggatagtttacgtgactcgataaatggctatagctaatgtatccaataatgttttacatccattattcctgttgtttacctgctaagggtagaaacatttaaccgccgacgtctttttctttggggacccatgccgaaagcgaaagataaatgtttgatcacgtgacggtagggtaacagtaaaggatactatctttctcttcatcctcagattgtgacattgtaacagaagaaaaagtttcgatattgataaaacgaaacgatgagattacaattgataaagtggatttctttcgattgttaataaatcttttatctgtcgatgtactaacgtttattattcatcattttagaattgcttgataggattattacattacagtagtacataccctagatacgaaagatatgtcatctgtagacgagttgaccaatctattttccaagattgggttcgaagaagctaaagtaaaggaaatcttaaagaatgctaaagtatccagctccctagagtccttagtaaacttggcatctgatgatttcccatggaacaagaattctagagctttaattcacacgttagcagcctctttaaagggagctgaagttcctcatttgcaatatatcgttgatggtattggtaagaatgatttgaagactgcattgcagatagatgcagctttgaagtacttgaagaccaagggtgaggatgccactgttgtggacttgaacaaagagtccggtgtcggtattgaagttactgaagatcaagttagaaaccgtgttgctaagtacgttgaggataacaaagataccattttgaaggaaagatacaagttagtgcctggtctatttgccaaaatcaaagctctccccgaattaaaatgggctgaaccacgtttgttcaaaccaatcattgacgaagaaatcttgaaggttttgggtccaaaagatgaaagagatatcgtaaagaaggaaaagaaaccaaaggctgaaaagaaggctaatggcaaagcaagcaaggaccaaacagaagaagatggtccaaagagatctatgttcacagaaggtttcttgggtgacttgcataaggttggagaaaatgagcaggcctacccagaactaatggctgagcatctcaaggctaccggtggtaaagtacacactagattcccaccagaacctaacggatatttacatattggtcattctaaggccattatggttaactttggcttcgctaaataccataacggggtatgttatctaagatttgatgataccaaccctgaagcagaagctccggaatatttcgagagtatcaaaagcatggtatcatggttggggttcaaaccatggaaaactacctattcctctgattacttcgatgagttataccaattagctgaaactttgattaagaacggaaaggcttatgtctgtcactgctctgcagaagaaataaaacgtggccgtggtatcaaagaagatggtacacctggtggtgaaagaaaagcttgtgtctccagagaaagacctattgaggaaagcttaactgagttcagaaagatgagagacggattctacaaaccaggtgaagcaatcttaagaatgaaacaagatttgaactctccatcaccacaaatgtgggatttgattgcttatagggtcttggatgctccacatccaagaactggtgacaaatggaaaatttacccaacatacgacttcactcactgtttagtcgattccttagaaaacattacccactccttgtgtaccacagaattttacttgtctagagaaagttacgaatggctatgtgaccaagtgcacgtcttcagaccagctcaaagagaatatggtagattgaacatcaccggtaccgttctatctaagagaaaaattgctaaacttgttactggtggatacgtcagcggatggaatgatcctcgtttattcacattggaagctatccgtagacgtggtgttccaccgggagccattctatctttcattaacactttgggtgtgaccaccagtaccactaatatccaagtcgtaagattcgaaagtgctattagaaagtacttggaagacactacacccagactcatgttcattttggatccagtggaagtggttgtggacaatgtcgatgaagatttcgttgagctatgtaacatcccatacaggccaaacactccagagttcggtgatagaaccgtcccattcaccaagagattctacatcgaaagaagcgacttctcggaagacgttgacaacaaggagttcttcagattaacacctaaccaatcagttggtttaatcaaagtaccatacaccgtatcctaccaatctttagagaaggatgcgaacgggaagatcactaaaattcatgttaaatatgagaacgaggaagccaaaccaaagaaaccaaagacctacattcaatgggtgccaatctccgaaaagcacgactccccagtaagaattgcggaaactagagtttacaaccaattgttcaagtccgaaaacccatcagcgcacccagatggttacttatctgatattaacccagacagcattatcgtgtacaagagttctgtcgctgaatacaacatcaacagcattataaagaactcgccatgggtcgtggacagtgcaaagaagtctgaattctatgtggaagaagaaaagggaagaaaggaagtctgcagattccaagccatgagagttggttatttcaccttggactctgatagcacagatgaaaagatcgtcttgaacaggatcgtttccttgaaagacggtactaaatgaagagatatctaaatatccgagtttgtcataatgcacttttactccatactctatctatctcatctatctcacctatataagaatataaacgtaataacaagttaatgtaccagatttacttactagtcattaccacttgttgccctctctctatgtcgattggaaatctgccttgaaaattgataatttttgatactgcaaagatgacaaggagaataagatcaacgttgaacaatgtacacttgagtgtggtatacaggttttcgactactgttttcaggaggttactaagatatctgatatatcaaatacatcccgaacgaaataacaatgtcgtctcgtcaaggtggtaaattaaagcctctaaagcaaaagaagaagcaaaaccaagatgttgatccagaggaagaagcctacaaggaaaagcaaaaggccgatgctgctgccaagaaagccatgatggccaatattaaagctggtaaaccattagtcggtggtggtatcaaaaagtccaagaaatagctcatttactcgctatatccgtgatgtttgaacatattctatttggaagaaatatcagatcgtgcaagagagaataaatacacctacacttgtatattcgatatataatcgccaaatttcaatataatatatatttcttcacaatccacacttttactaaggatcagggtcaacacaagtatatattgctctatatatcttccttctcatggtccattttatgagcatttacccattattattggtagatcgtttagtacggtactttatttatgtaaagaagatccaaattgagttttgtgtgaagcgagcacctcaagaatttggttgaatttttcagttaatcgatgagccttgatcagcagagaacttaaatttaatgaatcactaaccgtaccctggcattacttcggaacaagatattgcaatacatttgttacttcaagctactattgtcgttatttattattactttataggcgcagttacgagataccatagtagagcagtctgaataaacggtgcaaagggacccatcgaaatagatttacgtataacaatgagtgaggcagcaggcaaaactttaaggaaatataaaattgtttttctcggagaacaaggtgttgggaaaacttcattgatcacaaggtttatgtacgatacattcgatgataattatcaggcaactatcggtattgatttcctatcgaaaacaatgtatttggacgataaaaccattagattacagttatgggatactgctgggcaggaaaggttcaggtccttgatcccatcgtacatacgtgattcgcatgtagcaattgtggtgtacgatgtgactaataggaaatcttttgaatacattgacaaatggattgaagatgtcaagatggaacgtggtgaggaaaatgtaatattggttatcgttggtaacaagagtgaccttgtagaagaaagacaagtatcgactgaagaaggtgaacggaaatcaactgtactaaatgccaaattgtttatagaaacttcaacaaaggcaggatttaatgttaaaacactattcaagaagatcgcaaagcttcttcctgagttccaagacgcacagtctactccccttgataatgacactaacgataagaagcccggtgtcatcaacctcgccgcaccagatgaatcccaacagtcaaacggatgctgttgaggcatcgtatacataaaaagatcaagatctttaacagtacataccatgaattttaatgaatagtcagtcattaataacataagcaaaaagggtacaattatgaaagatcaagcagcatataggatacattggaatataataaaaatggggttactgttattttcctaacagtagccagtattttaatctgcagacgaagggaaagattggaaaaattcatttgttttattaaaagtatcaggagtcaatccaagaaaaacctcctactctgctgaagttgaaattgagatgaacccagtatcttttactgaaagtattgaattaatttagtccgtttattacatggactcaaagtcggtttctacgtaactaccgtttttcaacaaggtttttacaagtttaggaagaacttctacttgcaatgtctcgtacgggaaattttctccatcaacagaaataacgctattctttgcatatgggactaacctgaaagccaaaattttagaatgttccacttcaggctgtaagacatgtgaccctctattcaatgacattaaaattggggcaattctcgttaatggcgtacgtccgtctgttagaacgaaatccatggtaccgtcatccggcaaggcagctgggaagaattttgtatcaggcgcaatgtaaggcatcttaccagtatagaaaatccctgtgttacgcgttagttcaggatcaattctttcccaatctgacggtacgtcatcttcaaacggccatctgagtttgaaggagtcatcggtaattgttatatcgtccaagtttgactctttaccagatctagggatatcgagtgtaaacgtagaactagattctaaatcattccgtagattattcaatctatccttatgttgcaaataatgatcttttagttcatttttcgtcttggcagcgtatttgaaatatatgtcacacggatatttctttctttgtaaaacattcatagtgacaccaagttcaaaccttgctggtccaataaatctgatgaactccgtatcaatatcagattctgcgatgattccatacgtttgacttaagaatgacaatctaggttgatttttataggacggttgagtacaacacatgacatctattctcgattcgacagatttaaggagagccaatgcggcatacgatggattactggtaccatggcaagatatactcattgcattacctgaaccacaaggtaattgagtaatggctagcttctggaatgctttagcacgatctgatcttaaaaacaaaccattcataatttcgtgggggataccatcaccagaagcacatgcaactacgtcgtattcatctatatccaaattttttgcaatgtcgacagcatgcaaatgatatgttgtctctttaacaacgattttgcaaccacttgctaataatattggtttggctttggacaagaacaatttattggctttacccttaccaccgtgtgggttgataatgactagaattgatttgtttctcttagtgtttttataacttctattcaagatctcttctgccacatcagttcccatattaggaaacactgaagtatcgacgctcaattttattgtttttgggactaaatggttcctccttggctttgcaaaagtgacttcaatcaatgcagtatgatccggccatggggaaccatcatcttctgcttccatattcgtgacatcaagaatctttgcgtaaggaataaccgtatttgaaggtagcagcagagcttcattctcatctttagattccgtgtcgctgagacaagtaacacaactgattaacgaagctgtttcaaaaacactagattggaagctcccagaagcatcgccgtcttcgtcatcctcgtcatcgccgaaatcacctccattacttctgcgtgccaaaagcgtcgatgagcttgttgaaggaccggacgtaaattgatctttaatcaataaaccattttcgccaatgatggctcttgtatagggcaaatgatacttcctgctcagcttactcattattcttgcagccctctgtttcctttttctcagatgaagggaaatatctgaatcagactctgatctctgtttggaccacaacagttttggcaactcaacaagaataattaactacctcttttccacctttacgtgaaaataacgcaaaacaaaatcaaaaaaaaagagactgattcaaaattgagatacagtcaaacaagatcaatgactatgtcttctgttattctctgatgaatcctcttatcaatacctagctaataaatcacagggggtatgttttcgggatgacggatatattactgttcctttcagttcagttcgatttaatttgatatatctaacttgaaaacggagaacaccaaatcgttgtcataaatatgataaatggaaacgtttcttggaaatgataataaagtatagtactatccaccagttaaactagaattctcacagacaaattctctaaacaaatttcctaggttcacgatgcttatataagaaccgatgcgcaatgctttttttatcagactgtcttcttgtctagataacaaaccacgagagtagatccttagaacaattttcttaaatagtagaggcttgattaacaatactctggctgatattggatgtggacagaacagtttcttattcatcaatcatatctttacgttttaacttcgaaggcttcctgattttcgatttcatgtaaatctaagaaatacaaaacaaaagaaacatcagttggcacgtgatatataatcaattattacccggatattgttcttatatgaatgttaacttaaaaagattctaagcatcgttaaagactaacggccatactaatgaattaagaaatctgctgtcgactagaaagaatgaatatgtaattatgtatgttcgtaacgattcattgtgaggcaaaataatactagttactagacaccagtcagatatttgcgataacaagtttgcaatttagagaatacatatatatatcgaaacggtgaaatactcttaagttggtttctaactaaacacagtcaaagtatgcatgacccacagaaggatcctcgtactaggaaaagcaggcatgaactgaccccgcacaatctttcatctaccatacgttttactgacatacctgctcagtggaacaaggataacttcacatctgtgataactggttctggatatatagttgacgttagagagaaatacgtggatgaggtcgaagaagcaggagaacgagaagggggaaaaggaactggagctggagctggagctggaagtgaaagaggatgtcttgaatgggtagatgtagatttcagggactcttcctccgccaatagggcccaaaattcaataaataagataaaccatttcccatgtaggatgtccatggtgattcccaaagattggaaagaaaagttagagaaaatagaccaactgaaaccgttagagttcacaagagacaattttccctgggattacaaattagaactaccgtttgaaatggtaagtgaggtacctttaccaagaaagccgttgccggtggtgcaaccaataacaagtgacgcaggaagcacactatcctcggagaataacactgcatctacgaatgctgcctcggataaccttgcctcgaaggcgaacgaggcaccggcacagcagatagagatcccagagatcttagcacgggcatcaaagcatctaccagcataccaaccgggctcgatgactgcaccggatgtggtatctcaaaatctatcgaagattcctacgttacaaatgatcgagattctatcaaacttgaagatcttagccaaccagcataacaagaagccacaactggaacaattcttgaagactaacattgacttaacggtagctgtcactcaggcaatgctagaaatggggttgataaactatcacgtgatatcaaatgttctaggccaaatgcagggccaacattctgttggacccacgcctgccgcagccgcgcctacagtaccaactctgccgccagttcaactacctgagccgtctgtaccccagacggctcaaggcattaacagcggtggtaacggtactggtggtgatattaccaccaccgctacaaccaacgctgccaacaccccacagcagttcaacgaggcaaaactttcgctactgccgcaagatcaacagaacatgatcagaactgcgctttcgatgcccataacgaacataatggctcttccaccaggccagcaacaactaatacagcaactcaaaaacgactaccttctatagataataataatagcaataacaagaaaaatacatagcacaattcctatctcttagtcatccataatggctcgaaggctttctttctatctatagtgtataccaccgtgtttcccaacctaaaagttccgcgcgcaagttttcctctttaacgacttggctcatacaggaaactgaaaatggaaaaagctgaaataaccgacatttcaaaacaggaagatgtcaaatgcatgcggcgaaatgaagggaaacgaacgtcgagggaaatgtctaaggaaagcgcaaagggaaagaaatgccgaaacgattgggctactattcgaatgttttggcggtagctgccgccctccacagcaacacggagcactttgtgtcaggatcctttggagagattagatagatatttgtttatgtgcgtgtgtaaaaagaaaaacttgtcaagtcctctcttgcagtaatccgtttctgttttcagtatgttatatcaggtatcatcagtgccgatctgagctgataaggaaggaaggaggaaaggagggaaggaggaagagagggcagaagaggtttccgtcgcagtttcaccgacctattcgttaaaatacctattcgctgctcttaattttttgaatggcgcgcggataattactacagcgtaaaacactgtgcttattgagcttagagatcaatgaaaaaaaagtgcttatgaaattaaagcaaggcgattcttaaagggagcgcgggactatacagatgaggtgcacatgaatcatgggaaaaaaaatcgtatataaatccatgggtagattgttctctctgaactagaggaaccagtttctataatttacatgttgtttgtaattgtgtttttagtttacacccagtccacaagcacagagtaatcatttgaattaggaaaagatgtccgttgctgctaagtactacccaaacgaaccaactgaaccaaaggtcgttacctcagagattccaggtcctgagtccaaggctaaggtcgcttctctaggagaagttttcgattctagaccagcttatttcgttgctgattatgccaagtcttctggtaactacatcgttgacgttgacggtaataaattcttggatgtttacgcccaaatttcttccattgctctaggttacaacaacccagctttgattgaagctgccaagtccgacaaaatgattagagctttggttgacagaccagctttgggtaactttccaggtgctgatttggaagatatcttgaagcaattattgaaatttgctccaaagggtcaaaataaaatttggtccggtctttctggtgccgatgccaatgaattggcattcaaggccgctttcatgtactaccgtcaactacaaagaggtggtcacggtattgacttctctgaagaagaaaacagctccgttatggaaaacacttctccaggttcaccgcaattggctgtcctttctttcaagaaagctttccatggtagattgtttgcttctggttcatctacttgttccaagccaatccacaagttggatttcccagctttcaactggcctcatggtgaatacccagtttacaaatacccattgtccgaaaatgaggaagaaaataagaaggaagatgaccgttgtttggccatcgttgaagatttgatcaagagttggccaactccagtcgctgctttgatcatcgaacctattcaatccgaaggtggtgacaaccacgcctccaaatacttcttgcaaagcttgagagatttgacctccaaatacaacgtcgtttacatcattgatgaagttcaaactggtgtcggtgctactggtaagttctggtgccacgaatgggctgacattcaaccaccagttgatttggtcactttctccaagaagttccaatccgctggttactggttccacgatgacagattcattcctaataaggcttacagacaattcaacacctggtgtggtgatccagctagaatgattattgctggtgccattggtcaagaaatcgtagacaacaacttggtagatcaatgtgctcgtgtcggtgattacttgttcgaaaagttggaaaaattgcaagcaaaatacccaaccagattgatcaacttgagaggtaagaaccgtggtacatttatcgcttttgatttggaaacttcggctgaaagagaccagctattgaagctcttgaagagcaatggctgcaacgtcggtggttgtgctgaaaagtctgttagactaagaccatccttaactttcgaagaaaagcatgctgacatctttgtcgatgctttggaaaagtctattggccaactataaaatactgttctttcagttcctcatcagaacatgtatcaaaccccacacgattagtgtattcttacgtaaatagaagttatttataagaacgcctcataattatataaaatgtgactataattattatgacagaacggattttgcttcatacaaatacatggcagtttttcaacgagccaaagcttctttgacattcaagtatgcatgaaccttatttttctaatggacaagtttttcactgataaagtcaaagtgaaaaaatgaaaaccaattatgatggatcgtaagcagttccaacaacatgaagagaggaaagttcagtatggcaatacgataaaaatacagctcttactaatagatagataaaaacgagaatcatcaattagaaaactaatatgactgcataccctgatgttgcggcctgggatcttgactacacagtctggccttgtttttgcgatacacatatcagtcctccattaaggcccgaaacaaatgtggatggcgaagtgctggagctggtcgattcgcatggctataaagtgtcgttatataaggagataccacggataataaatgatttaaaggcgcataatgtaaaactgctcagtgcatctcgtacgtgggctcctgaaattgccattgagatgttgaagctcttcaaaattaagatgaacggtgaaatagtcagtctttactccgtttttgacgactttaactggggggaccatccaaagattaaccatattaggagtggtattaagaccgtgtatggcaaggacagtctaaatcaactgaaagtatgtttatttgacgacgagagtcgcaatagggatgtcgaaaaatatggtataaaatatctacatgttaaggatcctgttgaaggaccttcttggaagatgtataaaaattatctagaaagtctagatagctgataatatatttaaggtaaggacgttacatgttattaccggcttattaaaggccaagcattttgaaatccaagttgccgaatataatagtcgacaagcaaaaaagaatgccacctccaggaatcgaacctgggtttcatcggccacaacgatgtgtaataacccctatactaagatggccgaattcattgaaagttgaagttaggtcgccattatactgtataactgtcatcagctatcttagttactatgctctttgcgtagcttgtcttttatcatcataaccagaataagatcgtcgaatatggacttctcctcacctatagcagttgcactcatgaagtgaaagttactctttcaaacggcgcagtcacgtgaaggagtgtcctcaaagaagggacgcaaaattgcggtaccttcgtatttaccggccgagatgatcctttttcatacgattgcaaatattccaaaataaatgcacaatttcaggaacgtgataacctgttgaacgatgtgatcggttggttttcacgttactttggtacgttggatcaacgctaaaccaaaaagtaaacctggcctgctcgctccctatgcaacaacagcctattgcaaaggtaaatccttaatgaaagcaagttttgaaacactaggcgcgatgcctggcatttacaagaatgaattctttcccttatttactctcttacgttgagcgttttcggatattgtcttcgaaaccattggtatgattttcataaccttgttaaactgcagatcaagcgaaaatctcaaacaatgtacaaaaaatgtacaacaatgaggcagcgagatgaaaggaagtttgacgaatattcttggtggaaaacttcttccagcattttacatcaaatcaatgacggtttcgattctcgcatatgtttcgtaaattttactccgtactttctttggcagtaccaaagagacgcgatgttatgaaactaaaacttgaaaaaaaaaaaaaagaaaggatgcatacttcatattaaagaaaaccatgagctttgagaatgtagttcaatgtactgcaagagctttacatcattgaaaaggattgtcatcagttgtcataggggaaatgatagcaaaaaatcctagtaacgaagagagaagcttgtttggaggtgcgaaaggcgccactcgagtgggatgtaagagggaacaacccgagtgttttacattagagaaaacagtttatacgcagatgatgaatttatgatggatggtagttgctgttattgcagaattcgatcttcgtgccgcctttcatttggtccgatggctacaactaattaaattaaaacacagctcacacagttctctttgtgggaagttaatccgaaacagagaatattccgtcgattgcccctttggattgtcgacttagggtaacaagggaagaacaatggcattcggaatttcgataaagatgcgggttccgttaattcttaatgccgtttgaagcacactacctgaatcttcttgagaatattgtattataattagaaggaaagagaaatgcacgatttcatccctctttgtttcactacagaattgtatagagccagcaactgttaaaagtgggaagcaggtttggagtatatacagaaaatgttcgataaagagcggccttctaacaattttataaccttttcacttcgtcaccgtaccgccacgcaaccagaaaaattatgtagtgaaagaaaggtccagcccaaggtttcactccattttcttcccattgggaatgagtctctggtcaaggccactttgcattcacagtattgattcccccgcgatctgacggaggaaagattgtcgagaaacgtggaaccttccaattttaaaaaaaacacttccgttcacacgtttctcgtgcattatgacacagctgcggtcatttctgggtggcgctgtttttgttcactacttcgtgattaccttgtgcaattttactatgctctaagaccggaattgtggaaatctatccatacccgattgtccaatccattgaccattgttttctgagcaaatccgcagcattgtcggtaatggcttaatttgcctgttgcagaaatattgtctcaattttactggccaatttcttgtgggatccctaatcaagtaatggattgttaaggttgcggtgtaaatgcgtgccttcatttcttgttgcttgtcttggtttttttttattatttgttcggattccagctgtacgagttctctttgttatggaaaataacaaagtacatgtccataggtacagatagaacctagatttcgtgtccagtttcaactctaacagtgaaaagttcgttcaagaattatggaagcgcgccccctagctgaggtacaaaaaaagaaaaacatattagtgccttcagtcagaaaggtgtgcagccagacaattaaatgtttcaaggaacaatggtatcaataaatacaatgccatccgctttcagattattatgcacaaattcttgtcatacgtatttaccaggcgcttttattcttatttcacagaatcgaatttcaaacaacgctaagtttctgattacggatgcaaagctctccctgctgtactgcacttgtatctagactatctattgatcttggacttgtcacaaatgttcttcgggatgcacgtacggaatggtttcacgtttgtgttttgaagattttaatgcttgttattcagtggatttctttcactgtgatgaatgtttgataaagaagacacgagatagaacacttacagcactgcataagcatacaaacaaagtagcagacagaacttatgaatagtgttggactgtctagatgaggctgaagataatatatttcttttcagatatgagacgtactcatttttttccatgcttaatgaaacccaccattaaagtggatttcatgggaaagtttcgaccttggcttcttgcttgaaacgtagtacggtaaggatcgaatcgtctttcacatttgtgtgctttaattatgagagatttctggaaaagggtggcattcatcaatatgaagtccaatcaaggatgagaaaaatgttggcaaaaatagaatttattagaaacggtaacagcagtatctaacgtgtaccttttggtactcaggcttcttttgttgctggtgtctatgggctttcgcttcaaccctaataaacttttgctagtttacaagtctattttccttcaacctcacgtacaagcagcgtacacacatattactgtttcttttctaatccgctctagcgagtgttatgcactggattatcaatttttccgtctatcatttgccagtctttatctagccagttggctatccattaatcccttctacgtgcaacagtttaaagtggagagcatttccgcactttttaccggttgttcgtgtgatggtgaagtttctgttgccctctctccttgcgagaacacctcaaaaagctcgaaggcatatacatgtatcgtagatcgttctcattctgttgtttcttctctttccaggttttggtacagactatttgcaaactaaataaaattccaagccttcttgcaagaaagatctaccggagtttacacagttgttactctgttatgagttttgttctcttgtttcatttcaaaaatgcaaaccgctgccgtactgaccaacggtttatcaatgctattggggggggacactttttcaattatcttgatttgcaacggaagatccaacatcgtacaatccgtgcgcacggtacatgcaaaaagaaaaaaaagaaagataattatagctagagaaaatccagacgaggtattcgtaatttgctaaatatcaggtagaatgtctttatttagtacacagcagccagaaataagacatctgaaatccgttttaacagaatggctctgcagttgcaacttttctatatcggggtttaaaaaatggagtttgacttgcaaaggtaaagtactttccaaattacagatgaactcgatgcgtattagaggagccttatcagtgttgatcttaaaataatgttgtcgagccgttaaactgtggaagtattttgtgaattaaacgataatgatacataccaacggatgcatacccccgatatttcaattaatatcttttaggtgatatgatctcttaggtggaagcggagatataaatcaaaaactaataactaggtagagagcaaacgtaattaggcgaagaaaacagcctgtatatgttgaaggaaaagaaaagaattaatgcggtttcaattttgccattagtgcttgctgcaaagatcggaagagaatgataacatgctggagccataaacaaagaaaactggtgaagtgcacagtttgaattttgtaagggctagaattgaattagtgggagtccgactgaggtgaacccgtcaaacagagatgagaattacttgtgaagcttcagatgccttatgagattactcttaacattgaattttttgttgcagccttcccatgtgcattcgaaaggcttatcgccagaatgtaccaacatatgcgtacgcagagcgctaggtcttgtgaattgtttcccgcactgtgcgcaaatatctgccttcccattagctttaccctttacaactgtggttggactattgtgatgacgttgagcgtagcttatatgttgttttccacttttttgggaatgaggacgtgatcgattatcacatgtgttacgatgatgcagaggtggatgatagtacgagtttgtagatccaacggcaggccttatcatattattattcgtagcaactgtaattccactttggctaagcatagaacttgtacctgtgggttgatgatagatttgaggagcaacatgcatcgaattagtgcccagggaatgaacatggccagctgaaattccattcatctcaagtcccattcctgaaacgacattacttcccctccgaggtttgctttgagaaccgaatgacaagccatctaacgaggaagagctgctcaaagcgtaaacaacactgctgctgctgctgctgctgctactactactgctgctgtcgacattactttcaatggaaagacccgtagtggtatatctttgtgatgagccagagtaacgttccggagagcttaattggttgaatttggagtaaggcaccgatgcattgggatatgtggttgcagtgagcatatatggatggattgtttggctgttgaagtattgcggtggtaacagcgttgatattggtggtaaaaccaaattagattgccttgtgttagtcattattggttctaaggaattgatcgaagtcaaattgaaggacaatgaattgaagggcagaaattaaaagacgtgaaaaatgtagctaatgcgtaattgaactttgcctatctgtaattgagattaaatatccgatgtttatattactcttcgccctttttttatagtgaattgatctaaatgccaggagaagtatacttgttggatattgagttcaatctgtgaaatgaaaagatcttagtaaacaacagttttcaacttaatacattcaatgtgaaccttggcgctgtccaaaaaaaggatactaaccgaaaagtgattttggaaattgttatagttaatgaagcctaagatctaccaaaaaatattcagcctgtttatatcggagagtaaagtggattagattagcgactgtataaagttaacgaaaaatacttcgtagtaagaaatggaaatattgacatctcccatacctcaactacttagaaagcttattaagtcttgtcaggttctttgatatatgatcgctgataaagtttggtattcacagaggaacggaatacccaaaaaaaactggtagaaatcaatcgagtatatcgagatttctttttttgacatcttcaatgtctccaatataataacagattcttcagtaaactatgacaaagccaacctgcggaagcggagcttgatagagtttcctttgataaatgaaaaaggaaaaaattactttgacaaagcagtacaaaaccacgggaagctttttggcatgtacggatcgttagcatcaaagataacccaggagtagaaaggtgcctataagctacctagaactgggttctcttgaagagataacggaaacactggttctgcactaaaatctgcagggatgaaaaggaggacgggaattcttgcataatacaaacccagtttgtcaaaaaaaaaattaagtgcttttttcttttcgagtgggaaaattttcagtgagactaggaatgttgtttgttgtattgcaatgatcaagagaaaaatgacattctttgtcgtatgtcatataattggaatggatggagaaaggaaggaaatacacccagtagaatgactggcgcataatttctatgagcaatagtacaagatattctgtatataggtatgtagatgacaaatgttttcccgaagctggaagataagacggaacaataaatgccatacaagacaaaaaaatcactgatgcggaagcattaactatctgcacagaatcaatggtacttgcatgaagataatagtgccattacgacgcatccacgtaactaaatcagatattctgatcaggtaaggcctaaaaccaccgatgataagtccaccaaacacattcagttttcggaatatttgggaagtttcgaccctctgtcattatgtgtctagaaatagaatctcttgtatctctgagcctactttgaatgacgacacggaaaaatcgactgaagatgtttcgtcatacgcaaacgaaaaactgtaaagtgggtttaacgcaccacgaattctcatatgagggactgaaaccctttccgtagcgaatcacactttgttcctttattcctagttaatcaataccccaccataaaccaaatccaagaaatcttattcctttgtaatgtctttttcagtgttagtaagaattgcatcaacatgctatagggtatttactgtacagaataccgtgctggcacaagctgtctccattacgaactgtcgaaagtaatatctccttatcggggttccattaggacgccaaaaatgaatgcaagaaaaattagaatagtgcctgaaaaccaaaggatgaatatttgattttcttggtatccaatcgcttcaataacaagctattgatctgcgaagatatttcccacggaatatctagggttggattattggtttttatccggaataaaaccttagtttggcattaacagaatattcaaaaaaatgaaaccaggaaacatacactacaaggggcaacatggttaaccatgataaccagggcaacaatggactggcaaaattgttgaatgctggccaaacttgttctttacattcgaagatcaaccttgaatatgactgctcggaaggggagaatcggataattataagagttaaattgacatgatagcaatgttttgaatgtggagagagtaaaacacggggctggatgagtatataacttggtagataccttctctctacgacttttacataggagtccttctttttgatagttctttacatattcacgtagaacatctcgcagcaatgctcattttaatgagtcaactgcggcttttaagtccttatccaccgcgagagcttcattctaaaatgtaccacctgaagtggtactaaaagctgacctaaggaattactactgaaagaagtataggttttgaatccagcacgtgaggaggctttccgcttttagcttggttagctttacggttcatttaagcctcccacttccctacattcaaacatgcaatcttaccggaaaatcaggtcctattctctaggtggggtgaattcgtccaatccttatttttaactttctttttcttcctctcaatgcggtcgagccacaattaaagtaagtcacgagtgttgatatctgacaggacagtatatctcttacccggaatttgttttaccacgtgttgtggctttttaattaccctgtggcactttatcttgttaccccagcaacacgggttgatcttcccatcaacaatgaacttttttgcccccaagttggctgcaatatttggcttttcctcttagaaaatcaggtacaacactcgagaacctttcgtaacgtgccttttttccggttttgagataacgcattgtctacgtaattccattagagtatagatatcgccatgtgtgtactattaccatatacttaaaggtacgtggatctctaaacacatcatattctcttaccccactttcgcttccagtttcttatgatttcgaggctgagtcaaaaattcttctggaaaaaaagaaactgagtcgttagtcagcccctgtgatatgaaatgttttcctagaaacccccgttaatcacatgacgatcgtgggcggtgctgtgtgggttacttttctgctctgcccttctacgcccttgtaacagcccatgcgggataccagagacgaccctgttcgagtcccagtaaagtgtcaactttgataattagcaatcgtatgtagtgctgaccaagaacaaaacgtgggaccctttacagataaaaataaccgtagccatatcattattcgcaaaggaaagagggaaggtattgtgctgagaacaccttgtggcctgtgaggcatcattatcgccgattctcgtccaactgacacttatacttcctagaaacgccagcaattacttgtaattacataggttatggataaatgtcttttctcagccttttacagctgtaaaaccttgatcacattatcgtaattatcgtctcagtaaagtcagtggtcattttagataccataggcaatgccttttctttttctgataagtgaatgatatgattaacccgttctaatttccagacacatatatatataagggtccttgatggaattgagcatccttacacaacatcctttctcaaacatatatggtttcaagtcataaagaatactaatacatttcaatttgaatgtttgttaatttgtttcgtatcttacagtacatatatctttaatacaaactaaacacaaagttcagttataaagttattactcttgttcagccttgttataaagaatacaatcgctaagcaaggtgttaaagaaaaatacagaaattgttcacattactaccgctgaaattcagattgatatacgatcaaactatccatctgattacaaacacagataaaaacaagttttttgaagctgacccaattccttttttgcgttaaagttaacaagtttaaaggaataacaggaccccttctttactcccattttattgatttccagtttatttttcctttgcttcctagacaacaaaaattgtgacaaagagcaattgaaaaaaaaaaaaaaaaggcagaacactttgaccagaaggctataaacgtatttctaaattcttactcgagagcctctttttgcgatatatctcaataagaatctcagatacaaagttaagaatacttgccgttttattgagcaatactgatttcatttaaacagctcacttcttgctttttactgttcttctattgcaaacaatttctccctaattgttaagcaggatagaaatttatcaatagaatacaatcaagaaatcattcaggcgctaaagtcaagaaaacagaaacttttcacattctccgttagtttacgttttattagaactgataactaaaatacagttctgataagatagaagaaattaagcgttgatacaactactttcaaagtgattaccttacaaagcatactaagtcacatacaaatacacgatgggaacaaagattaaggagattccagctgactctccatacgctagaaatgatttccacgttttaaccgctcctcaagtggaaaaactattatccacacacatcaaccagggtttaaacaacacgcaaatagctgaaagactgagccttgttggtgaaaatacccttggtgatgatacaaaaatcaatattaagggtattctaatcagtcaaatctgtaatgccatgatcatggtgttgatcatatcgatggttatcactctcgccattaaagactggatctctggtggtgttcttgcctttgtcgttgggatcaacgtcgtcatcggtgcatatcaagaatataatgcttctaagacaatgaactcgttgaaatcgctatccactccatctgctcacgttatcagagatggtaatgacatcaccattcaatcaaaggaattagtgccgggtgatatttgtatcattaaggtcggtgacaccgtgccggcagatttgagactcttggaatcaattaatttggaaacagatgaagccttattaactggtgaatcgcttccagtcgccaagtctcattctgaagtttacgagaaagatacccctgttggtgatcgtttaaaccttgcctttgcagcatctactgttaccaagggtagagctactggtattgttataaagaccgctttgaacactgaaattggtaagattgcaaagtcattgaaatcagaaacttcattcatctcaaaggatgaaaacaaatcatttggacaaaatttgtggatcacattgaaagagactatcggttctttccttggtactaatgtcggaactccattacaccgtaaattgtctcaattggctattttattgttcgtcgttgccgttatcttcgccattgtcgttatgggtactcaaaaatatagggtcaacaagcaagttgcgatctatgccatttgtgttgctatttctatgattccatcttcgttggttgtcgtcttgacgatcaccatgtcagcaggtgctaaagttatggctacgagaaatgttattgttcgtaaattggattctttggaagctttaggcgctgtcaacgatatctgttccgataagacaggtactttgacacaaggtaaaatgatcgctaaacaagtttggattccacaatttggtactattactgtccaagaatccaatgagcctttcaatccaaccatcggcgaaattcatttaattcctaaattctcaccataccaatataaacatgatgatgaagaagatgttggcattatcccagacttcaaatccaagtatttggctggtgaattgggtccacttaatgtttctctatttgaccaatggctctacactgctactttagctaacatcgccacagtgttccaagactctgaaactcaagattggaaggcacacggtgaccctactgaaatcgctatccaagtctttgcaactagaatggacttacctagacatgttttaaccggtgaggacaaagatgatgaaaaggatgcccgtgctaacagctcctttgaacatgtggctgaattcccattcgattccagtgtgaagagaatgtctgccatctataagaataccgaggatccagcaaccccaatttatgaagtgttcaccaaaggtgcatttgaaagagtgttgcaatgttgtgactcctggtataccacacctgatggcaaaccatcgcctttgagtaaggaagatttggaaaccattcaaaagaacgttgacaccctgtctagtgaagggttaagagtgttagcctttgctaagaaaagttttaacgaatcggaattcaacgccaacaaggataaactattgaaggaacgtgactttgtcgaatgtaaattaacatttttagggttgatcggtatttatgatccaccaagacaagaatcacttgccgctgttaaaaaatgtcatcaagctggaatcaatgtgcatatgttaacaggtgacttccctggtactgccaagtccattgctcaagaagttggtatcttacctcataacttataccattatccaaaggaagtggtaaatttcatggttatggccgcaactgatttcgatgctttaagtgatcaagaaattgatgatttacgtgttttgcctttagtcattgctcgttgtgccccacagaccaaggtccgtatgattgaggcattacatcgtagaagcaagttctgtgccatgacaggtgatggtgttaacgattcaccatcattgaaaattgctaacgttggtattgctatgggtattaatggttctgatgttgccaaggatgcatctgacatcgttttgagtgacgataactttgcatctattttgaacgctgttgaagaaggtagaagaatgagtgataatatccaaaaattcgtcttacaacttttggcagagaatgtggcacaagctttatacttgatggttggtttatgtttcgttgataaagaaggtttctctgtgttcccattgtcacctgtcgaagtgttgtggattattgtcgttacctcatgtttcccagctatgggtcttggtttagagaaggccagtgttgacgttatggaaaagccaccaaaggatgccaaggctgttgttttcacctgggaagtcattattgatatgcttgtatacggtgtcatcatggcagcatgttgtatggcatgtttcgttaccgtgctctatggtaccggtgatggtaacttgggttctgactgtaacgatgcacttggtgaaacgtgtcacttggttttcagaggccgtgctgcagcatttgcaacaatgacttggtgtgcattgattttagcctgggaagttgtcgacatgagaagatcattcttcatgatgaaccctgaaagtgaaacaccatacactcaagtgttcaaggacatctggagcaatcaattcttgttttggtccattgttggtgggttctgttccgtgttcccagtggtttatatcccagtaatcaacgacaaagtgttcttacattacaatatcagttacgaatggggattcgcaatcggatttagtttcgcattctgggcaggcgttgaattatacaaatatggtaagagacattacttcggcatcaaggacagagtcgacaatccagaaaatgatttagaaaagagagcagtgcacgatccgttcgaacaatacactacttccttctccagaatgaatacttttcacaacgacgagaagactatctgaaagttgaaaagatgcaggaataagcggtgctttttaattatttttaatctacaacttatctggaacaaatgtatattagcaaatccatatgataagtatcatcaataatttaatttttataaataccatactacattaacaaaagtagtttatctcactttagatcgattttactctagtttcccgtcaaaactctttatatttggcctgaatcgattaagactttgggcccaaaagttactaagccggaacaactgattatgaccgggtaatacatggtctttactcttttcaaatctttttctccctttccagcgtgtaaaatagtttcaagacaattttcgtcaagcgatacgcccaatggataagaaaagtcaaaaacagtcaaaaattattcccacgggtaattaaagaaacccaccatcttagcgggctacatatgtaatcagctactgtataacagcagtgcaccttacaaacttcagatatcctactaaaaacaaaaaaccgagaagcaaagcaaggtcaatgagcttgcttagatggctagtaccattgccgttcccttttttcttcccttttctcccttctgattcgttttctgcgcttgttttcctgtagtttttcgctcaaaaaaaggcaaaaaaacgcctaattgaatctcgttcgaaaatcacatccaaggcgttgtttatttatttatataaatcgaattttacaaatgtttgatttctcttacttgttttagtttattgtaatatactctactttatttttttattctttatgaatgcttacattcattgaaaccgcgatcctctatgaattgacaggcttctggttcaatctctcttactaattacgaacccgctcattccgtagctcctggcttaatacctgattgtgtttagtttcaagagtcttataagggggtgaggagagaatcggtttttttttaactcaagagtaacacaaactcttggcgctaagcgctggcctgaaacttagactgaagttttcttcaaatataaaagaaccttcggaatagatggttcgtcagaaaagtcaaattgagcggcgtgctgtgaactctgttcgtttatcctcctcttctccgttatcttccaaaatgcatgtgccggagaaaagtaccccgccaagttaccctgacgaacattcaaaaacaaacgccgcccaagtggagctaaccgcccagcgggaagtgaccaaaattgatgaaaaacaagaaaacgaaaaacaacaacgagtgaaaacaggtgaaaaacaaacgctgctgcgacatacaccaaggctcaaccccttgatacatttagcgatgtctcctactgctgctccgaataatacgcctgtggaggaaaacgatctacaacagggtgttatctctccttcacgtggagagccttccgggattccagggacaaagcctcaaaccgaggttttgccgccacttcctcgttacggagagactaagcaagaggaaaaggaggttgccgtgaaatttgagaaaaaaacgggtacccaagactttgatcacgtggtttcggctgataaacaacatgttccaaaaataaatacgcgtacaccatctatctgtatatccagtagcaatacgctgccgaacactgggaaagggagtagcaccttatatcaagactcgcgcactcccgtgtatttgttcaacgataggatagactctggtcaagtgagtgaaacagaaacacttcacgattcaagaaagggcgaggaaattcaagctgatactggtagtcatcaaaatgaacgcatgctgcgacaaagcggacatagactcgaaggcaaaaagggcaatggcagaaacattggtaatcctggaactgtttcacatgacggtgcgagcggtattgctgcgccttcatcttcgccgatccttgagacctcgagcgcttcccgtgatagagatctgcatgccacaggaagcgccatgactccaaaaagactacattttgattgttccacagagaaaatagatccgggtgcaggcatctcatcaatttcagctcaaaagatcaatattacttcattactaaactcgagatcgacagcagaatcaatctcgccccctccatctacggcaggaaatgaatacactattcatttcccatcctcagcagcgtcaaatcctcctcactccacaggatccttcctacatccaaaatatcaaaatcaaaacccgcaggtctcatctaccatgaatagaattgtttctccaacctatatgttcgaaaccgatcaggttcatggtcctttcagtaattctagtagtggcagtaatagtagtggcagtaataacggtagcacagcaaacagtaataacaataatacacatattacctaccaaccgaagtatttcaacacaaaattcgatgagttaaggaatagagtgttattaggatcctcaaacgcttttccgaaagtagagtcggctaacaagtatccatataatagcacaatggtcaacccaactttgaatgatcaagattccaacgtggatgcggaagctgccgcaatcatttctcagatgaggtcttccccattacccccatttaacgaacagttcggctctggcaatcatgatagccgaccgaattcgtcattatcaaaccaatctctccaaaataatgcctttaatccgttctccaaaagacttttacctaagccagtgcttcgggttaaccaacgaccattgactggcaaccaggatgaactcgttataatggaagaagaggatgatgatgatgacgggtatggcgatggtgattacgaaatgaccgaagggggatcaaaggcaccagaaactgttgcatggaataagaatggaaaaagaagattgtccagaagaagatcaggcccaccacattatcaatctcaattgacaggaattaaaaatgagattggagaccatccagatactacggcataccccgctgcggatatctcggaaaatggtatgcatataaaaagatcaaggtcttcatcattatctactgaacacactggattattgtcaccgaattccaaacatgccaaacaactgaagtttaaagaatctaattacaataatgatgtttctaacgagcaaatggtcaaatcaagtgatcaaataaagaaaagaaatgctacgggggcacggtcaagaactggctgctggatctgtagattgcgtaagaagaaatgtacagaagagaaaccgcaatgccagaactgcgtgaggttgcacctcgaatgcttttacgacatagtaaaacccgattttatttcagatcctgctaaaaaggcagcaaaactcgaagaaattaaaaagaaaacaaaagaagctaagagacaagcaatgaaaaagaagacttggttataatcaaagagacaatcatctctaaattcttctcagacacacatctgtatcatcaggtgttctcagtttttttacaataatggacaacccctcaaaactctatagataccatttttgactgaacttttatgattatgttcacctcccaatatataatatactcagatatatttgctgtaataaatgtgtagactgactttaatatacaatgtatgaattgtacgtattttaagcacaaagcttagggaatagtatggaaatgatttcaaaagacaacgtagttcaatatttaaactttatgctgctttcaaaggaggattgagatgatatgaggatcaacaaaataaaataagataaaataaaagaacatacaaaatatagacacatacattacaaccaaaatttggaataattaagataaaatttaaaaaagtgtcgtttcagtaactaaggaatagagaaaaacaaggcgttaaaaataattatatgtgaatcacttcagtacatgaaaggtaaacacatttttcaatccgagaactattattttgcgctatgaataaaagaaaaagttgaattgatcatcagccttttcagccattgaaggcaaacgatcccctgcaatggagacattgttattgggaaagaattgagagtcccttctgatattagttgaattctgaggatggttttcttgattttgcaagttgtcaaattgtggtgagaacgaagtgaatggattatggaattgggcatattgggagcccatatatgttctctgttgagcttgttcgtacagaccagcggagttgttcgcctgggatgacataacaacactgtccctggcaaatatacttatttgagaatcatgcgaagcgttctgtaaatagttgaaagtggacagattctggacattaagtttaggagcttcattaaggccgttactattttctctggaatcagtagaactgccattggtgttagtggaagacagtggtatcgaagaggacgaactttgaacatggatagatgaaaaaggagatgaaacagagccattgctagtatttgtgctagcactgttgttgccgtgatttgacatctcggtcctattgtacaaactgaaagatttttcattctcacttctttcaactgtggttgagacggaaaatgatggcgtgacattaaaactcagtggcggttggggagcagaagaaccactgtaattccatacagggttagcaggagtcgtgttatctttcacagcttcttcagtataatgtggcgatgtagacatgtccatactacttccacctgatgcgttactgttctctctagtagtgaaagccacactgaatccatttttctgtgggtatatctttcccgatccagcaccatcgatggagaagctttttgttacggactctggtttagcaatattgggcagtgagttggctttaacccttttaacagctgtatggacgtatctcttcttttccgtatctaatttgaaaccgcaacaatttttctctaagaattttttgttcgaataaactaggacttggactcttgatgagtgctcttcctttgcggtaagcttattctttgactttccaactaacctatccggtaagttatccatggataagagcttttcatcattaaagtcagataaagtgaatttcgtaggtccaaattcttttaacatgatatcttcttcatagaagtaatctctggtcggtctatgtagatgttcgaaactgatcgacaaatcattactagacagtaactcgtttgtgaggttgaccatagactgacagaaagaagttgatctatgggcgaattttagcacatttttatgagattttatccagcacatcattattctagccattgccaaatactgaaacatctcgcagtttttaaattccttcataatgactttatcaatgaggtgagtgaaaaacttgaagataaactctaaaaatttggtttctgattgtatacttctaatattgctgttgccactgttattgatactgttggcggatccgttcccgttcatcagtgttttatcattaggcataatagttgcagcagatgaagttgtatttgaagaaacaccattgatcatttgatacatgtggaaactacctattagaaggatcaaatcttggaaaatcatagaaatgttcttaatgtacctaatttctatcttatcgaaaagcaaagtttgaaaatgcttcagacgatctgaatgtctattattcttccaagtctgagggaagatatgagatccgattaatggaagaatataaaactccataatttccatgtttattattctttttttaatagtttcctgcactttcaaatcatctaaggagttaagtagtttcttgaatagggatccgttgggatcacctaacaagtttgtgaagttggggatcccagcatcacttggtaatcttgacaaagagcttctaacaaattgataagctgcattgccgaaatttttggtatgcgtgtagcagatacctctttgtaagaaagtttctcctacagatggcacgatagtggaagcgatatccagatatctcagaggtttctggaaatctgcctgttggtatctgtcggacaaatgttccattatgatcttatatctttgggaacatccgatgtagagtaaacatctttgtgatgccatgacgcaatcaatagaaaaagagtcctctggttttaaaacatttgaagcatcatcgttcagtttcttcgttgagatgttcaatttcgatctagtatccgagggaatcaatgcagtaaggttgtaatttgcgaatataagttctagcgttgaatagtaaagtttatggatctgtgggaagattttttgtagaatagagttcaattgcctgtgaccagcatagttcggtctggaaccctctgcaacgttcctatttctccaattttggaaatacttgaatatggggtaatggacgtgcttccaagtcaagtccaaaatacgatgtgcatctgacgagcggatctccgatttttttgatccggtgtcagtagtaatatcttgatgaaggccttccggtataagcgactgaagcaacatctgcatgatttttgaatgtatcatttgaatagcgcccttcatcaagctgtcatctctaaagaaatcggtttccaggacagattgtaactgtttttggaacccggaaaaggtttcctgtaaatcagtattcagtttttgatccattttataacgtatacgctcatccaatgggtacaggacaaaaaagagtgttaagattaggtattagtactattatcgtcgttgtgagtgggagaaacaccgaaaaaaaaaatctgaagctctttcttctttccttcaataacagagaaagcttaattctaaaacctgtaaaaatcaacaaagacaacaggagacgaacaagttatgagtgagacctttctctaatcttcttacttgagtagcagggactgaataaatcaaaagaccaaaaaaataacaactatgatacggaataaaaaagaaaacctaagataaaaaaaaaactctaccttagtttcttactttataacggtttttttgttcctcaatttttgtaaatctttcttgccttgttctttgacgaattttttaaagaaaggtttacttttttttttaaatttttcaatattatttccgtctattcttctagctgggccaaaatttgagttttctttccgtctgatctcctctaagaatctcctttatatcttcacttcctgggttggaaaatgtctatttattaacacacttatccagaatagaatagaaatatttcaatgtatcacacacaccaaattttccgaaatgttgtgctgtgataaacgggcggtcgtttgtgaggtatggtgccgataagaaagagagttcaaaaagtaggcagtaaagaaagaaaaaattcaaaaacaaacacacacgaaagtataaatactaaagagaaagaaatttggtgcgagtgtaataatccacacacatacaatgaagaatcaaccgacagagtataaaaataaaaaagtaaaaaaaaagaagtagaataatctgtccctataataacaccttctctagtttcactggatgaatagatgatataaatgacctgatctgattctgattctgattctgcctggatatatcaaacatatatgcaagcattcaggatctaaaacaatccgaaataacaccgatgcacagacatagtatatatacatatatatatatatgtaattcttttttttcaatactatctgggttaaacaatttgtaggaaatccaaaacgttaatatattgtgcgaaaaaatgtcgacaatactgcaaaaaaattataaaaaaaaattattctcgatctggaaaaaatcccatcagtaatgcagatgtgacaaagaaatcagggagaacagggggaaaaaacgcagttaatttttttttttctcattgattttctttttcatatttttgatatacgggaaggtacatcaggatctgacgcgttaatacaaaggaagagcagagagctcatgagtactcagagatgaacggtcagcagattgctgtcagttatgtaatcgcttctgtgtttaaacgcgagtacgacgatatccctaagtgaggggcagcgggcaagagactttacaaaggcgaatctgatctcgtaggtggacggttctgggcaaggtactcttgtactgagaagaaatcacggggtacgaagtacccccagagatcaacgtgcaatagaagaacactcactgcacgcgcgctgcgcgtgcttgtgaggcctatctggatttgcctccttgtaaattatgtcattgcgcagtacatacgggccaaactccgcaccatgtgactgcaatacaggtattcgttctggaccaaaatcttctcgaagaagaaagagttgggcccagatctttcgcgttacctttccattcccatttccccactcccgtttactgcgtgtatttcttccgaaatctgaaatcattgattacatcactacttctcgtttttgaaaaaaaatacaacgaattcaatacaatttgctcacccggatatcagcaagccattgaaccgtcctagatttgttgctatggcgggtcagggacaaagcggtgacctgttttcgagaatcgcgggaagtaaaagtacaaaaaggaagcaatttaggccatattaacatcacgtgcttatagcgtgacattaatttcttaaatactcattgatcctttctttgttcatattattattattattattattattattattattattattctttacatttggtatacacttttacgcggcgtttatcacttgaccaagggtgggacagtattggtctcatcatctccatggtaaaaatactatgcgttgctgagaagaactctattgcaaagaatgtcgctcagatcctctctggtgggagaagcagtatgagaccatcgacttctccatatatcaagaattacgatttccaatacgatttccaatggcttaacatgggccgttgtaacgtgacaatgacagctgtcgctggtcatttgatgaatttagcattctcacaaaacgaatatggttggggtaaatgcgatccgaatttgttgttcgatgcgccaacaattgacgagatggacgataagatcgttaaaaatttacagaacgagggtagacatgctacacatttgatgatttggaccgattgtgatcgtgagggagaatgtattggttgggaaatcgtacaagctgtcaatagatcaaactctagcttggtctcttcagattcggtgtaccgtgcagttttctctcatttggagccatctcatattatcgcgtcggccaatcgtcccaggaagttggaccaacgtcaggtggacgcggtacgagcaaggcaagaaattgatctacgagcaggcttggctttcactagattacttacaggaaattatagatcggtgttacaatctgatttggaatataaacaattggcaaagaaagatgataaaccagttatatcgtacggaacttgtcaattccccacgttgggtttcgtcgttgatagatatgaaagagttataaattttataccagaacaattttggcatatattactctctgtcaaggatctcgatggctcagagagtaaagtaaaattccagtgggaaagaggtcatcttttcgatagactggcagtactgtccatttatgaacattgcatcggaacatgcgaggatagggcaaaagtaatacatgtttctagcaaagatacaaagaagtttcgacctttgcccctaacgacggtcgaattgcagaaaaattgttcccggttcttcaaactaagtgctaagaaaactttggacgctgcggaaaaattataccaacaaggttacatctcatacccaagaactgaaacggataagttcccagcaaagacggacctcaaatcattgctcaataaacatcagggtcatagcgaatggggtccttatgtcacaaaccttatgaacgaaaattcaactagtacaaataaataccaatggccaagaagcggtaatcatgatgatcaggcgcatccacctattcatccaattctttgtgttgacattgcgaaaactgataatagaatgacctcagacgagaaaactgtttataattatgtggtaaaacatttcttagcttgttgttcaacggatgctaggggtagatcaactacattaaagcttgactggggtggtgaaacattctatgcaaatggtattcaggttcttgaacgaaatttcttagacatctaccaatgggcagattggaaatctaatgatacgttacctgcttaccagatgagcgacgatgtagtggtatcaaaaactgaaatgaaatcagggcaaacatctcctcctaagcacatgactgaaagtgaattgattatgctcatggacgctaatggtattggcacggatgcgaccattgctgaccatattgaaaagatcaaatcacggaattatattaaagttcaaactggatccggatctggcgcaaagaaaactgcttctgtctttctccccacctccttgggtcgttctttggtacatggttttgaaaagatagggcttgaagaatccttttcgaaaccatttttaagaagagatcttgaaaaggatctacagctaatctgtggaggtacaaaggataagaaagacgttgtatcattaatcatcggcatgtatagaaattattatcagatcacgaccagtcaaatgaggaatttgattaaggtttacaacgatattaaagcagaaagccaaggccaagttactcagcgaaacagagtaaattagtgtatggttaatatggaagataacagtttagatgatgctaattctatctaattaattctacattatatataagtatcatagttttgtttgcatgaattgtttttcttttcatgaatgctgcgttagcttgtcgaggatgtactattttatatttatttcaataaggaacggttcatattataattgcctggtctttcatggatgtggccctacaccagcaagcagaactttgggcttcaacctggatccacactttgatatttgctctctcaaatattctttcgacacgcttttttatgatggttgaattttctccatctatgtattggacatggatataaccaacgagcgatggctttgcagaggaattactctttgacttggcttccactggagactctgtatgtgaatgtgaactttcatgagagtgattgttctcctcttcatgagagttcgatgatgtgtgagagtgaccatgagaatggccatgactatttcctgaggtagattctggccaaaatcgcggagccgtatatccagtcactccaggagttgacacaatctgattcaaaacgtttttcaataaagcgtgctttttgtcgtcaacctttaacaacaagcttgaccctgtagactttagtaatgggagcgagcttagaaggattaacgatgcaataaaaaatgaggcaattggatcgaatatctgcgatttaaagatcttggtcaataaagtagatatgataactccgacagagccaagggtatctgccaaaacatgaaggaagatacctctcatgttgtcattagattcatgttcgccgtgagcatggccatggtcaaatgcacatagacctacaacgtttacaagtaaccctaggatagaaactactaacaactcggtagttcctagtattgtgactggattaaatattctttggaatgattcaatgaaaatttcaataacaattccaatcaacaagaccccatttgtgaaacctgcaatagtctctaagtagcccaacgcaaaaggatacttgtcactagcggggtattttgaaagcacgccagccaataaaccgagaaatagagaagtacaatcgagagccatgtgtagcgagtcagataataatcccaatgacctggatctaaaggaatatagaagctgaacaaacatgaatgctgaattaagtaatagaaaagaaaaaatggatttcgtctctttgtttgtggctagactcataagaagtttactagtagttagaaattctttctcattctcaagaagctctttagagtcatgagtatgcgagtgggtggaaacggagtgactatgttcatgttcatgctcgtttagttggtgctgacaatgcttatcaggattttcgtcctccttaggatgataaccttgattttcatattccaatgaacttggaagtatgccacttataagaataaacacagccgttaggaagtcactttttgaagagcttgaaattgcattaaaagacaaatattgtaataccattgccatgaaaccgataatagtggcagaatattggttttgccataccgtcgcaaaaggttggttatctagagtcgtctttatatcctggcaaacaagcaatagcaccagtgtgcagcctagaaagacaaacaacattgagtaattgatctttgtgatctttgtttggttatctgtcgataaagtaacccaaagatacattatgaccaaagaaatgcaagacactgataataatgcagatttaggaacttttatgtggtccaaataatacagtgatttcttgcttctagctgatgaaaatatgattgcaagaatcaatatatatgacagaactgtggtaaaggacaaagaattattataataatcaatacctatgctcaacaaaggcaagacagcatatttccgtaggttatattcagaggctgtgactagctgcaataaaagaactgagaccgttgatgcctctaccggtccaaggaaaagattcaaaattataataagaaaagatatcactagagtcagagcatgattgctgaatgttcgcagcacctgagaacacaaagtgatcaaacaagatgcaaagatgggtaaaactagatattgaattaacaacggcacatggttagcagattggtctagaatatcatcgtgaactgttaaaatcaagttatttgacaacaataacgtaggatagagaagggtcaacggaattcttgaaagtaatgtattagcattagaacttgaatctgtggtctgtaccataattgcactaaacagttcttccagaagaaccttaaaagttaaacctcgttgaatattaggtggataatactcctgctataatcagaaaccagcacctgtatgtcggttttattattggcccaaatgaaaagagcaaaaaatccgggaactaataaggtacggagaaatgtatacccagttccgaaccaatgcttttcttaatcaacccctcgctggatactccaactcattcaagtgccaattgatccttcctgacacattattcaaggctgtgtcgtttgctgtttcagaatcagctttggtttctttcaatcgatgtgtcccgttaggaaaccttaaaggtgatatatcattacccggatactacgttttcattcgtctcagacatattagcaccatagatgatgagcatcaagtgcggattgcctgctttcaatgcactgtccatccattatgtagtatactgttttaacgtatctggaagtcctttgtcaatgtgttgttattcattaagtcatgtacttgagatgtatataggttgttaatatctgcataatttatgtgtctgatatcctcttttgatgaaatgtgtttagtattaccttatagcttcaagatctggtctccagacttatatttgaagggctcaaatccatacttctgtgcaaaatgcctaggaacaaatcttccaccaacataatggttggcctctggcttcaaaaattgcgcgcaaggtttaggcacagtcaatgataccaaggtatcaggttgaatggccttattatcaatggggcccttatcgacatcccatccactgggcacatctacagctacaattggcactttcttctcaaattgtttcaattttgacaaaatatcatcgaatggggctctcatcggtggatggaatgagaatccaaacatggaatcaatgacacataaggtattctcatgctctagatactctagccagttgtcctcaccttgacccaagacaggcacgtcaaagaactctaattgtttcaccaattgtccgtaaaactcttctcttccggaccttttagggtaatacactaccggttcatacccgaacaacttcaagtgtctagcacagactaacccgtcaccaccgttgttacctggtcccgagattaccaatacctggctcttggaagattttaccgggtactgttgtaacactgcttcagctaccgataaccctgcgagctccatcaattgctgtaaagtgaacccaacagggcccattaactcttgatcaatggaagcagctacttttgaactaacaactttgaatgacatttggaattccgttagagtgtgatagtcgtatagccccagatccttatggaactttctaaagccctctcttcttccatgttttacacaactatttcttacagtgcaaggtttccctttattttaacatttttctgcaatgatgagtatggtcataggagcggaagaaacgaaacaattttgtagtcaataagaatatgattgtcggcgttttgtttataccattatataatacagtatgtatatgctattttgtaaggagttcattggttgttccctgctctcactgtcgaacggagatatttcatatcttccatgattaacttcttcaaccaaatgatctcttttcgttgttcctctaaatcgttctttagatctgttatatgacggtctttttcttgcaacagtttttcgtacgtccttatagtaacctcagttagagatgatgtcttttcttggtcactgactggtggtgtattttgtagttgcaagacatctcccacgacgtcggaatcttttctagtgatatatttccgtactcgctttctcgcaggttgctcttcctcattgatctgttccatagctttcccattggtactctcggtcattgctctgggccaatcaaactggctattgggactttggttggcatttgcctggacgttagaatagtaatcctgatcttgtactctactcacttgttccagtttattatccacctgtgataatgaaaagtccggtgaagtgattgtatttacaaccgatttacgtctgggggcaagcacgggcgattccctagcagacgcagtggtacttttccctggcctcctcaacggtgttattaaccccgttgtcttgtcgtagactttgtcgatgttgaaagataatacctgccatagaggatcgtccacgttatcccgtatcttccagttgttctcatccaacttcaaaaaataccgattgtacgggctcacgtcataacttagcaatatctctttcaatatctgttgaaatcgctgaaacaattcgatatttgatttgggtacgttcgattgttcatctaagggtacgattgtcactagagcatcgtaaagttgtgagagactttggaaatattgcatatgacgttcgtccaagggtttcagcgatataggagattgctgattcggactaatcgtggaattcaatagctcgggaagctccaagacttctccgttggatatcaattggtaacccttgatcaaaaatacgtcgagcttgatctgatgatgcatgatgcctgtcggactactatgtgaagtgctcccgatatcagacatggctcttccagtatgtgtacgtagcaggggagggccgatctttgaagtccgtaacaagcagttcaaagaccttaagtatgctgccgcttccgcagattttctcgcttactgtgtatttctttctctctttctctctatctttcgtttcgttaaggtgcaacatttccacattgcatcaccttatgttctagcaagaactaaaagcgacaaaattgcaaaacaaagacgcatctcattgaacacatagagcccttctgcaagggctaaaatccgaagcctttcatatgtagaccaaggcagtaccaaagctagccggacctagatcgaagatcgttatcaacttataacgtaatccactgacggacatatacattcacatcactgagacagaaatataagtcacgtgaagaagtggcgccatatatatgtatatatgccttagttccccaatacatagactagttacgatatgtggttcatcgaactgtaaccatttgatgttcccatgtcactggtaacttttgtccttgccttaggtatctttgagtgtctcatttcccatggctatgttcgagccttttaatcggtgaaaagtttcgaaacggttaatatcacgtaaaagatatcaattccatatttaaatttagacgagaatgtaatttgactgaaacaacaacgtcttttgataaaaaaagtgtattctatacgttgcagagctacattaatcaagtgaaccattgaacgagacgagtttcaatcaattggataggaatcattgtactttggcgattctatttagaatataattggaagtgaaaagtgaagccgtttgatcttggaagcaataaaaagatgtccgctagtcctgtatctcaggtattctcaccaagcaacaatggggtcagtgtgttccgtagaaagaaggagaagagaggtattactttctcgatgatgttggttggtgcttctggtactggtaagaccactttcgctaacaatttattggaatctaccattttccctcatagatatcaacaagatgttccagctagcacgaataacgagaatgttaagattatccaaccaactaaggttgtcacgttcaattcgatgaacggtattcccagctacatgtcggcatttgatccagcctcgccgtttttggaaccaggtatcactgtgacgtctactgccctggagatcacgacgaaatctagtgaggatatcgatagcgctacccctgaaaagatcaatttctttctcaccgacaccctgggactgggtgaaaacttaaataatgggatctgtttcgatgagattgcttcatatttggagcaacaatttgattcggtactcgctgaggagaccagaatcaagagaaatccaaggttccaggatacaagagttcatgtcgcgttatactttattgaacccacgggacatgggttacgtgaattggatgttgaaattatgaagagactatcccgctacacaaatgttctaccaattgtcgctagagcagattcgttcacacctgatgaattgactaggttcaagaagagaattatggaagacattgatagatttaacgttcctatctacaaattcgaagttgacgaaaatgaggatgatctagaaacaattgaagagaacaaggcattagcgagacttcagccgtttgctattatctgcgccgaccaacgcgataatgctaccggtaaatactatcgtgagtatccatggggtaaaattgacatcgataatgaaaacatttcggacttgaaattgttgaaaagggttctcttcgggtcccatttgcaagagtttaaggacacgacacaaaatctgttgtatgaaaactaccgtgctgagaaattggcgtctgtgccagcctgggacattgaaaacaacgaagttatagatacttctatcaatgacgaaaacaatgagggtaattcttcagggttgatgaaagggttgactagaaacagtacagctccatccttgtcaaatttcgcctctctaataaatacaggaaagtttaagtctcaacaatcacttgcaattccacctcaatctgaaaccccatctacaccacgtctaaccggggtagatgaaggagatgagtctcgcgcttcaatctctgccagttcacagaaatctactcctgccaatattcaaacttctccagaaagaacaaagttacggaatatttccgaaaatatcccatacatgcttcagcacgagcgcatagtagcaaggaaacaaaagcttgaagaattggaggcacaatctgccaaagagttacaaaagagaattcaagaacttgaaagaaaggctattgaattgaagatgaaggaaaagctactaagacaaaactcacatagtcaatctcaagaatctatccagactaatacaactaaacaaaattcaacttctggaggtgcttacattaagaaagaggaaacctataacgatttagcttcgataatcagcaaaaaagaatgaattcagtcttgatatctttctttggcatttttgtaagtcgaagtgtttggttcctgaaacgatttcatatgtaatttaaacaatattgattattttgtatattgcaaacggtcacgtctagattgatctgctacctgtttccaaatttgatgagtttaagatggtgatgtaaaaatcagaaaaatatacgtactgttacaggtatatatatatatataatataataatgagttaaggtattttcgtgccacttatcaataaatggaatttatctgttcagatgacatagtattatgagataaaaaagattggtgaaaaatttatgttcatccagtgcttcaagataaaaaatagctagtgtaactggagagaactaagaaaaccgaaaaatgcaaaataatgttcccgatggcaattaaaaacatcaagaaacaacattcattcagcgacgatgagaaaaggcactgggggaaataataggaaaagagatttaaccgaattgaaaaatggttgcaaaataacattaaagagttggaaacaagacataattgatcaataaagacttcaagtgcgaacataagtcattttaacaacgcaaaaaagggttatgacgacgtaaatatgaagtgtaagaaaaaggcaatgggaagatgatctttttataatatttttcatttggagaatgcattttcgtaggagtaattggtagtagatgactttagatcattagtgactccatttgcaagagtggcaatgctactattgttactaccagtgcttccattattattgttgcttgaacttggattgccgctgatagttttaccattttgagcattatttgagttgctagttggttggccagaaccactgcttccactccttctgctgtttggaccacgaacaccaagtgggtttttagagaaactcaatctaattccacctttggtgttgtgtgcgccaactggtcttggtaattgactaccatataattcggctagagctcttgtagcatgtgcgacgtcttcaaactcaacaaagcacataggaccatgcccactgttattgttgttcttgtttctgaatgataacctcttgaatcctttttgacctccaaatagttgtcgtagttcttgttcggtggcatctggaggtaggttacccacataaagtgtattgcaaggtggattttgatcggctggattggctggaggaggaactcttgctaacaacgataagtccacctgagaaattccaggagtattctgtaaaacacttgccacacttctggtgataggttgtgactgagtagagttgttagcgttaacattagttgcagatgaagaattactaatgttggttctgctgccagatttatgaggagtatgcgacgttgatgaagttggtgttacaggtttagaagacacagaagctgaggacctaccgttcatctgttgggcgacaccgacctgtgaagatggatcagagtttggcggtaaatttgtcgcacttgaattggcctgttgagggccagagaaaacggaactgctttgctttctagcagcaccattcttggatgcagaccaatctacaactgcattttgttgttgttgattgtacgtggtatttaccatgttgttcacagtagagagtgaagggtttgatccccaaattgtgtcattaatgccatctccttccattaacaagaatgatttaccagcatcgatgttttgcagtggagtttgagcagacgtttgtgcaggtggaatatgtggattttctgcgctgaagggatcagaaaatgagaatctagaccgttgtcctagcagactgggccttttccgacttgatgattggggaggcgatgtcaacgttggagcaacgtttgaggatacgcttccggatgatggtatttgaaatgagtttgtgttcagttgtggctgcaactgaggtgagtttgtctggaaaaacagctgttgattagttaattcgtcgatgacctccaccgccaccttgaatggatatgctggaccgaatatttgggatttgatattaagaatagaggcatattggcatgccaaatgctgagattcaaattttgccaccacgtacggttggttatcttcatgaggtatcacatcaatggatagtacaccatgagccaatgagaaaagggcataagcctccctcaagtttatgtcggtaggaatattgcgcaatatcaatagataactaccaatggatggggtttgtggttgatttccagtgttaatggataatgtgttcagtaccgatgagaggtttagtggtgaaccactgtggtccgagtggtggcgaggtattgtcgaaccatttgcatgtgttggcgatgcgttgctgggattaactgctgataactgttcagagctagtactgaatccacgatgcagctgataagttgtatcgaaggaaggatggatcatcatggggttttcgttgatgttattggagtttggatttgagttgatattgcttattggcatatgaatgatggcctcgtcgtaagaatgatcaatgtgtggaaatgtgcactaaagtaacactaatgccaaaaaaagacgataaatgagatgaagagcgaagattcactttttgtcaaacgctcaagaaactcaattaaatagcagaacagaataatcaccaaagaaaacaatgttttgctttcgacaaaatgctgaataattgttgaactgtgtggtgtctctctatcgactggagttcttctctaaggttagaatattggtggatgagttcactgtttttttaaccaatcacaaaaggatgggaagcagaaaatagaagaataaactgctattctccaggtacgtgaacgagtgaagtacgcaactcctatctcactgttacaaaatacaattgataatgttctgaaacaggactgtactcctatgattcacaagaagaatgagacttttttccttcttttccctcttctcttttgtttcttgaaagttttatgtaacccttttgttctttaggaagtaattaatttttttttatcaaaaaaaaaattcctttaaaagatatcgatcgagatgggttatttccaagaaaatagtatgtttccaaaaaccaaaaaaaacaaagatgaattttaagaaaaggaaacgaaatgataaaataggtataacaaagaaaacagaaatgaaatcttacgctcaatgagttttttggacttaggcctctagaattgattgatcttggtcaattaatggcctttcgtttcttcctgttacactgtcgccaaaaaatccttgtaaagacagttttctgtcggaacacgctatttcgtaatgctgttatttttcctgtttttctctaattcagcgactttagtgccctgtaagtcgatgctctgaattggtgtctctgtcactctgctcgagtttgctcgtgtcggtgatagtaagtatacggaaatataaacaacaaataactgatgagcttcaacggtgaccggtgtttgcagctatgtttgtgtaagcagcaagtgtgaaagttgatttcactaagttctttcgttcttttttcctttttttttcctttttctcgttttccctttccaactttttagacaatcatttttttttaaattcatttgtctcacgatgctggtaattcattaagtattttgataaccattaagataatgaaagtgggaagagatgcgggtaaagtagaaaatgatcttcgtgagtaacactttagctcagtcgtttctcctctgtgcttgccaaaatcttttttgcgcgatccctttggtcgctgcgctttctacctgtttgaccaaaactatatattttatccaactacgattctcttgggcgggacttatattctctacgaatgccaaagcgactgattaatttagtttagttacttttttaatgagattgtctgtattgtgtcgctgttgaagcacatgcacgtcggtttactcgtggaacgcgtaactagtcagtgtgataattacagacaaaaatgggggaaagcactcaccacgatgattcacacgtgatagtatacttcaatactttaaggttgtcgtttttgactgttattattttcaaacatttcaatacgtggcaaaaatatggaggggaggaaggagaacaagtagctatactacatccgtaaatacattcttagaaagcttggctgaaccgaaagatatattcaagacaagcgtcccgatgattcgattctttgcggaaataagactcttggccgtctcgaattttgtagtcattgtcttataagctctctcaagatgtacgagtacggaatccttttagtcgcattgcacagcctaagaaagttcggttgccatattgtgaaaaagtccgtttcaaacatgaaaccggggggagggttctgcagagtctaattcgtttctcgccacagtggccgttggaacccttgatgatttaggtagggtaatgattcgtattgtgtgattacatcgcgtgatctgcggtattgaattcccgtccataacgaagtggattggcgtaataatgagaagcaggaccgcagtcaaggatggaatgaatttcggctatagagaactccccgtcaataagaagttagttgaaagttcaaatgaagaggaacaaaagagttgtgtaggctctttttatttcatctcagtgtttctgccaattctctaatctcttttagattctctctcgggtagtggtcttttttttctggtttatctaagcagcattgtggtatgtaactccatctgccatttgtgttacatgcttcaatttccctcgaactagttagatcctgacagaatttcaaagcttcggagatttttgcatcaactttcgcacgattatcgcatacttcgaagagaccaatcttgtctttcttgctttccgctgtagactccggtatcgttattggagagtaattaatttgatatccattgtcaacgctactataagatgtaaaacttgacatcctgcttggtctccgtgacattggagagacaagactatctttccttacgcccttattagtcaaactggcatgcattacgctaccgttatgctctgttggtgtctcaaacattgcgtttaactgcatgtcacaaatactgcttcgaggagacttaattgcatctttgaaaacaaacgccgagtctagtgtttcccttgacgaaatatctttgttgaaatgtagctctcgccaaattatgttttcatctgaggcagatgcttcaactttagtttcgattggaagtatggtctttggtttatcttttttgggggagtttgacaactttttatttttagccgctgaagtcgccttttccttaaagttctcctctttcacctctattgaagctttgattcctgctttaatcttacttgtccttttttttgccattgtaaccttcttctcgccgtttagaaatataggtatatgctgttcatgtcaagaatgtgctcctccctgttgtttgtagcttcttgacgttgtattttcatttcttgttcattttatatgaaacaatataaaaaattgtgatattccattgtaaagaaatgaaacatcaaatcaaaggaacgtgtagatagcgtattctccgttattcaatacggcttggaacttttgatatgacgaattagaaaactgtgatatcatattattattgagaaagctatacataaaatatgtcgacaaaaaaatgactgtacaggatgagttaattgctaatgctgaatactgataggttgcagttttatcgcaaattagtaagaactaacttatagagtcagcatcaatcgccgaactgaaaactgatgaacctgatgtgattacgaccaaagagagtgataattgttgtggagaaaagctggagggaaataattcctgcattaaaaattgtaaaaaagtaggtgttttattaaggctcattcataaagatagcaacgcattctacgtcattaccagtgaggagatctcaatgtaaggttgatttgatagtgtttgagatcttgttgacaacgtttccattctcgtcagtggtgtgagtctccttttgttgcacagatcttggaacaccacttttggtatcgtattgatatccttcttcatgttgcgataaaccatgcgactttgcttcggaagtgggacgatctgtgtttccttgttcatcaactgacacatttcttgtatgtctattgttgtctgaggatgtgtatgcattctccgtggagtaagtgttcttatcgggatctaccaagcttttcgaatttccaccgtattcagaggaaaaagtgcctggaatctggttatcatgactgtcaccaacattaccggattttttcttaaggtcttctgctgttagagcagcacccatcgtaggcgggatagaattcttctcagcaagtgctggaatacctttcgatttcacggtccctttaatctcaccattattagatttgttggatgctcctcctctggtatcagaaatatgagtattccccatgtcctgctccaaaccatactcattctgaggatctgaaccagttttttgggattgcgaagaagttttacgcaaaccgacagcacccatcacagaactccaaagacctgagtcagcagtgttttcatcatgtgcagcatttccgtcgtgcttcacgttaggatctaaggtatgagaagttccttcataagccctactagaaacgtaattgttgtcaacgtaagttccctgcatgtcttgggaagtgtgtttttgagcatttttatgagagctatcgccagtgattggtttttcgtttttcttctcgaacacattggtgtcaaattggttaggattaacgtactgtgatgtgttatggaattgattttgttggccggaagacccgccgtaagagccatcgttttgactatcagtagcatcgatagcagagaacttctgctctttagtcgtgttactaccagtattccttgaaattccagtgtcggttgctacagcattggagctttgcttcaacgcatagtcattaccaaccaatggttcacttgtcgcatcatttattcccttggaaggcattgatttttgagggacagatctattgtactgcgtttcagaggtagcagactttagggtatgcttggcagtcgattgttgcgattcacttgaatgagtgttcgcaggtactgaagctgccgcaaccctagttctagcatctttggcctccttatccttgaagttaccgtaatcatacttgtcttgaacattatcacgatgagtttgagattgtgattggtgtttggacacgtgttctttccccaaatcagaatcattgactgtgtgcttagttggagaatttgactcctcttgttgcttcttagatttgtcagagtcggactttccacctagacctaaggtagccattatagcatgtttgttgaaagaactctttcttctgtgcttcccggagtcttcactttgagggcgagtatctctgtcataaatgtctgtcttctcggtatctttagcggcatatttgctagaaccggctaactcttggccattccccgatttcaatggttcgccaatatttttagtagttgcatagctcttgctatcgttggtatgaactggcgtatccgaggaaccaacattaacatattcttgttgttgagcgtttctgccaggatggtgcgaggataagggctcattacctccaagtaccgacccatgatgcccattcgagtcgttcaagtttctggcatgagatggtgctttgaccccaggtggatgatcatcgaatgtgccttcattgccataagatggatagctcagaccgtaatttttcttatcactgtcacttgggaaactttcattgtagttttggccaatgttggttccaggctctgcttggtttctagatgtttgccagtgattatcatgagggtaagcttgggtcccagaggtagttgtggtttgttggtgagaattgttcaagttcccttgattagctgatgaagactggtaatcctttctggaaggatcgttggattcctcttcatgaccttcgagatttttaaccttgttaacaatgttgttgtagacgctaattaaaagaaaattggaaataattattaatatgtgttagtattggtttcagatgggtatcaaacgggagaaaaaatgttgttttctagtgaatggcgtttttttattgagattcgagtcgttatgtttaattaattttgatttgactacttttgactacaattaaacagcaacggtgtctttcttcttgtagcgaagtttccaccatttgatattttgacggttgttgtcattgacaccgctttcatatgtgtgcttgtcgacgttgtaactatcatcatgagagctagtaccctcatacggttgataagtgtttgctcctttgactttctgaacaccaattgtgacactcaaaattattgaccagaacgaacttaataataataagaacactgaggtccataaaaatgcgaacatcttggtgttcatcgatgctgaacgaccggcatcacggaaagtgttacgacctttcacgtaacaagctgtgtacaaacaggctgccaatgtgatgaaaaataaagccagccaaatagaaacagtagacaataccgcaccgacaccaaccttgaaaaaggatagcaacacaggaatcaatgcgagtaccacgaagaataaaccaatcaacaacattgcccaaccaacacgacttaaataatagtaggtattacgattatctctaaatgatgctggaagatcaggactgtttccaaaattgtctctaggggaaaatggtaagtccgcttgtttgcctgaacaacttccgatttcaccattctcataagcacaccaatggtaattgaaccatcttgtagtatctggagcaccaggtaacccactggtgtcagcctcaaaccaatagaatttgtccaatacaccagtagtcctagcaccagacaatataacaaaaaacgtcaacaaaccagaacccaataagaaaagcaacgataacgaagaaacgaaccctttgaacttcatgatattattaaaaattagtattatatggttattattttagctttgattatggagaagaagaacaaactgagagaaacaaaatcacaccaaaacaattaacagaattaaaaaatcctttcatccaaaattagctcaaaaggtaaaaggttacaactcaacttggacggtcaactctttaatcttgatgtctttttataacaaagtcaaccccttaaattaatatcggtagatttaaattgtataccttattctttaacggaagcaaaaacaagacgccgaaaagagcaaacataaatgcctactgccacacaccctttagaaaccctttttgccctactttgagcggtcattcagagcaataaagtttcttctgcaggatgtttctcttcaaatgcttacctcccctaattatttaggtactgagtttcttctctgttttcttttcgactgtcggcattttcctttttccaaagtttgctccggagaataagtgtcaaatggcttatataatccatgtcgagaaaggcagtgatagcaaacactcagtagagatatcctgcacgagacagtgagtggcaactggaggcatttggatgagagacttgtcgagaattagaaaccgcagtcaatattcacagttcaatagtgtgcccattcgttacaggaaacaaaatggacacttgaagccttttttttgattattctgtcagttgttctccgttggataataattgccttgctcaaaacgccatttctatttctcagacctcttgcatttggacgttgaatactctgaattgtatgattatctccgaaggataacaaaacgtatccttgcttagcgatttatgattatataatcactaatgttccttcggctagaaatcatgtatatttatggcattcgaatccaactctgtggtttcccgatcttagaggtgttataacgtattccctcagcttcgagaagacactaaatggccatgcatatgttacgattttcttgttgcacgtttccttagagaatttcgttggccaaagcttgaattacatcacttatgattaatagagagttatttggtcaaacgcactcagaagtgatattaaaaaatgaagtatccttcttatctgattatcagcattatgtgtgagttggttactttctaaattattacgcataattatacgagtattctattttatattaaaaaattatacaaatgctacctccgctagcgacgccagtataatgacggtgacaagctttcttcatgtaatgaaatcaacttcaaaatacgcctagttcttaatcaatatcggagaggttttcgtatttgagtgtgtcgttatcatactccaatctgctgtgaatcagtaagctctccaatgttgcataaataggacaccatattttgatgtataaatactcattgacgcgcagaactctaggtatcaatgtgaagtccacaatagaaccgatgcaggcggtcagttcttccctcttataactataatttggattcccgaagaaaagtgtcaagttctgtctcccccagatttgcaccttaagaagttcttcgaaagggttttcaattgtacattgagtaccgaccatgccactacgagtaaggtatatagtcacattgttaccattgtcgaaaatacttaaaattttagcagtaactttgatgtctttgtgatccatttgcacgttattcttaatatcaataatgtcaacagttttaggatttcgggtaccaaatagctcaatgggacgagtagcagcgtcttcttctattttgtcaacaccttccctcttcaattggttctcaagcttggcaattgaatcgtcttttgggtcttctgaggaaccggcagagtcatagaaagcttgttcctgtagcagttgcggattctcagacattctattcttggatattggcaagaagcgactcatggttaacgtgtacagttgtatgacctctgatggcatccgtttaaatattttatttcttagaggcttcaataacttgtattcctcagtggtaactggcgtggtaggagtaatgggatcggcgtcaagtataacagtgtttagcttaccttgaaataattgacatttaacagtgaatttgaatatgatacttcgatgggtaatattactgttgcctttatctgcacattccattaaacccatcttgattattgattggagtttttcgtttaatgattccacccgatttagatatatcaatgcatgaacgtgctcattctctggtattctttcctggaaactacccaaaaaggaatcgtacccatagttgactttggggttagccgtaaaatctgtaaaagacagaactagcgttttacctcctgtatatttcacggtgaccgcaagtccaataactgtgtagtacctcgaactcgctgaaggaacaatgttggagacacgtactagtggaaacttgttctctgtgaaggtgacttcctttggagtaggaagagcagatctgaggaccacgtccttgagagcccatttacttgattttgctgctccaatagtaaattccttcttgtaaatggttatgtcgtatcgattattgtctatcagttccttcaattcaagcagcgagttctttattgagtgtgggtaggaacgaaccccgatcttactgaaaaatttagcaacgttggtgatggctatctcgtaacaattgtactccggtacaaaaactgctgaaaggagaggtagttcatatgtataaacataaattagaagaaaatcatcttctataagcgaagattcaggatcaagatattgattcggtataaatccgagaattttaccatcagagatatgatagagcctatcagttattgctttggagatcgagtcaggttttaaatcaaacggatcagacccttcttcttgtattgttcgtggttgctcaaactgagactgagatgagataataggatcatatggtaattgatatgaagaaatatccaggtcctgcctggttacttgccgatgatgggtcaaggcgcccagatctgtaagtttaattttttttacagtcccacttgaaataaaatcagaagttgacatacctttgttgctccctattggcctcttttgttcttttgcgctttgtattatggaatcattgcaaggattctgttctaaagaactgaattgaggcgtatcactttcgatggcagttttagtggattctttcgcgacttgatctgcttctccatcaggattggaactaattgattgaagaggtaatgtatctatattatgctgttgggtttgggaatcaaattcattgaaactgtcgttattcacctctctttgtaaacccaactggaacaacggattcacgatagctgtattttctttcggaagtaacctggtggggggtgcttcttgtagaaccaaagaatcgaggtacgactgcatttcagtacagtaactagtcaggctcttgaattgaaaatcagcgtttcgtttttctcttttcaataggtttctaaacagcttttcgatcgaaggcttgagtagcttatattcatctgcagtggattggtcaaagtaggattttaaatccaaaagtttcagttcatgaatctgtagagatgctttatcataagcagtgataaacaaccctttcacgcttatcattcccatgtagcgcttctctaattcttctaacacgaaatcagatgaatagtccaaaccggctatttgcatgcccaacttctcgaataacgaagaaagaaccattcggagtaatacatcgcattcaaagcttttattttttatcttcccacagtaagtgttcaatccagctttaccattggtgaagttatcgaaatggaacaggcatttatcgtttttagtatatgctactttactgagaattgatataaagtgcacgggcttcgatacaattgatccatgctgatagtatttgttcaagcattcaggaccaggaatatactcatatgggtacttttccatggtgctcgcactccattaccttttcctttctttaactgaagttgtttctaacgtttttcttcaaccttcaatgcaccgtttaattcattggatgcgctcataaaaatcatatctcaacatggaattaatatagagatggttcccagataaaacagcgccaacggctgcgagcaaccacaagagagccaaagcaccgaattgaaatggcaataggtgaaaggaaaagtatgataattgaatgtttatcgaaaatttaacaatacattatttactaacatttagccaaatgatataatcaactgtagggaattttagatcaagaaagaaagggttcgcagagcctaaagttctagtgacgcaggacgagtggtacaacgaagcagtaaagatcgaagatggcgcagaacgttggtttctttccgatataaagaagactatgaagggatatctggaggcaatgcgagcttatgatagagccttgatttctgagaaacctaataacgatgacacatacaatatccattataaccaaactagactgttgcttaaaatctatactgattatgtgaacgtcgatggttatatcaacctgcttcaatatgttaatttagatggaattgattccgtagaaaccttactggtgaccattgacgctattatcaaaaggtttgaaactgttgtagagagtttcccagaggaagttggatgggatttgctattcaacctattaatatcgtattctacctatgtggaatctcagactaatatcccaggcgagactctaatcaacattgtaacagggttcatttcgcatttccatcacatcatgagattagagaatgagctattggagagtgtagatatggcaaatttgaacgaacaggaagaggaggacgatgttagttcttatcgaccagataatttagctgaacaatctcaagtagatcttcgcaccggtactggcatcaagaccagaggtgctgagaacgaggattacgggttggccctatctactgaaacttttgacaaggaaactgtcgttgacactgttactctaggctacaaatttgtatatgagataatggcaaatcagcttgaatccgagaatactgctcccggtaagataatcaatgttgcacagaagaactacttggaagaattgttggtaaagttcatcaaccaattggatgatatggtagtaactctaaaaataggccaatctgacgtccaggaattagtgatagcgaaaaggtcaattgaaagtctgaaacttttgtatcaaggagatcttcacatgtttctagataccttgggaacgactgatgaagattcgatgatgagcaatgttgagcttttagatatggcaataaatactttctccactgagaacagttggcaaattcgaacgtatctatcaaggacattgggtaaattacaaacgatacttgccgaaagacaatccaacattattagtggtaaaaccaagaacaaagacaacgagttaagcccaatcgttttcagtttatgcgatgtcatgatcaacagagcggataatgagctttccaggtgtctactaaagcaaacggaattgaaccagctgcagggacaatcgcacccggaagaggatattgttaagaccatcgaattattacaacagaatgcaaagaccctgttagtgaatgcgaaatccatcgcccataggtcttgcggcttcagtgaatacatcactgacaagttgaaaagaaactacatctatggacaagcttccataaggttagacatcatagagtctccacggactagaaaaataccagaggacttagatgatcaaccttcatatcgagctctctgtattccttagggcagaacttaattcccaacactgtcgtggtatatagacggcaagtagcgaatacacttgtagccaacacttgatatatagcatcaattatatcatatacgcctataaaccttggagaaagggtccacagtttcgtatatatccgccacactatcacccgacaaacattcttgcatctgggacccctgggccctctgccgttgagttgcgtactgtcttgtatctttttgtactcttcacatgaccgtttcaaggcttttcgatgtatttattttaagaaactactgtttcaggaaatgatatcgaaatctgaacgttttcctgttttcatagtacataaaaccagggaaactttttgtattgacatattggaatttgatctgagacgtggatgatacaaacaggaggcttaggtgaataaggtttgaggataggttggggtaaacgttcagtaggattatcaagggttgtgaaaccggcaggttcaatatataaaaatgagctacaattataacggccaaggttattaccgattcgacggtgatgaacatagggcatctcaccaagctcaagaaaatagttatcagatgtatgagccatctgaagacgacagaaacgatgaaaatcataggtacagaactgctgccggaacagatgagcagtataatgggtttgtgaaccattatccggaaatgggtgaatatcgccagcctggtgatatgtcccaataccaggtgccaaatattcaagtggatgcgtcaagtcctatagcgaatacatttgatccggcgtatcctgggcaaactccatatgtgcaagcagattttaatgataatcagtattacggtagaaattcgtatcagaatgagcaagcacctagtattaactccgcgaccgattattatgcgaatcaagatacaaggccaatcttggaacaacctcatcagttatacaattaccagcaacaggatgatatcgaaaatcctatatacgtggatcaaaacggtgatgattatcagatcaacacttatttaaacagtaaaggtgatatggtggatccattcgaagctggccagcgtggtgaaccgtcggagtgggatatcaacgattatgttagtaattacgacgacgaagacggaagcagttctttcggaagttatgggaatgacgtggcgacacttgataggcttggtgaattgaaatatgaatcagatgaggacggtgctgacttgggagagagaaagtctcccgccattcaaagaaagccaacggtagttagaaagttcaaattatgtcagggaaatttcatcttcgattgtccaatcagtagccaattgttgtctcaatattctgcaggagctggtccagaaaaattgtctaatgaatttaagttcatgagatatcaagctgttacctgtgaaccaaaccagtttcaaagtaatacgttcaatttacgtcagttgatgtatccgtacccaagaagaacagagcttatgatcgtaattacaatgtacaatgaagatgatattttactcggcaaaactttgaaaggtgttatggataacataagacattttacaaaacgttcaaactcctctgtttggggcccagatgcatggaagaagatttgtgtttgtgtggttagtgatggtagatcaaaaattaatgaacgttctctcgcgttaatgagtgcattaggttgctatcaagatggttttgcgaaagaggctatcaatgacaagaaagtcgtcactcatgtctatgaacatacaactaaagtcaatatcacctctgtgtcatctacgaatgtcgagttaggatatggcgatagcaccatacctgtgcaaatgcttttctgtttgaaagagaagaatcagaagaagattaattctcaccgttgggcatttgaggcctttgcagaaacactaaacccgaatgtcataattctcttggatgctggtacaatgcccggaaaggattctatttatcagctatggagagagtttaaggatccccaagtgggtggcgcatgcggtgaaatcaaagctgatttaggatctggatatactaaactattaaatcccttgattgcatcgcaaaactttgaatataaaatgtctaacattttggataaaacgacagaatctaactttgggtttatatctgtcctaccaggtgctttttctgcctatagattcgaggcattaaaaggtgaaccgatgcgaaagtatttcttaggtgacgaccttaatggtaccgttttcatctcgaatatgtacttggccgaagatcgtattttatgtttcgaaatcgtcaccaaacgtgatagcaactgggtcttaagatattgccgtgggtcatacggtgcaactgatgtgccagaaaagattccagaattcatcctccagagaagacgttggttaaacgggtcattttttgctgcgttatattcatttattcatttctacaaaattttcacatctgggcacactatactgaggaaaataatcttaatgtttgagtttacttacttgttcgtgacgaccttagtttcatggttttcgctaagttcatttttccttgtattcagaatattaacgctatcgatagccatttcattcccagattataaggttttcagagtattttcagtgttattcctatggttatacgggctatcagtgttggtgacattcatcctatcgcttggtaacaaaccgaaaggaacacctttattctatttgagtacatttattttctttgctgttttgatggtgtatatgctggcatgttccatttacatgagtgtttattctattcaaaatctgatcgattcaggaacgactactttcaaaggattaattacgaaagaaacattcagggatttggtgatttccatagggtcaacttatgcgctttacctgttaagttcgattatctacttacatcccatgcatatgtttacgtctctggtccaatacgtgttgttaagtccatcgtatatcaacgttttgaacatttatgccttctgcaatgtgcatgatatttcatggggtaccaagggctctgctgctaaaccgttgggatccatccaatctaaggatgatggtaccgtcaagatggaaattccaatatctgagaaagaaattgatgagaatttccacaaattcaatagtatcttgactgaacctaaaccgaaagaagttgaagcagaactatccttagaagaatccaaatcaagttattatgccatggtcagatctttggtagttatcctatgggtagtttccaatttcatcatagtggccgttgtgttggagaccggtggtataagtcaatacaaagatattgatgattcagcgaaagggtttacttccactgatcaagaggtgtcgattttaaattccaaatctacgatttatttctcagtaatcctttggatagttgcattcatggcattatttagattcattggatgttgtgtctattgtatcggaagaactgtcagaaagctaaggttctaactaagtgttaacaaagaatgtaatataataccagcataccaaaacgttggcgacaattattttctccttttcaaggaagagagaggttttgatgattgattttaatgatataatgataataaaagtgtcttaaaattgaattatcatatatatataatatatacacaataatttgaaaagtataaaaaagatggaactgatggtgaggtgatcattgtaggcgacgtaataaaccactcaaaccagtaaatgaagtgaaatggttatgtgtataaaaaaggaatgaataattttggcagtcgttagacacttcatattattcgtcattttttttaataatttgttgtagtagtttttatttggcgtaaaaacttcccttcataatttgaatcaaagtccataaagcaaagactggcatagaatggttaagataaaggtgataaaaacttagaagtaaaaaatggaatcacttgaaatatcgttagtctcatcaaaagcgttcgttaacttaaaagagtaatttaagcaacgtgctcaaccaaatcgacaactctttcagagtaaccgtattcgttatcgtaccaagcaacaaccttgacgaactttggagacaattgaataccagcagaggcgtcaaagatggtggagtgagtgtcaccaaggaaatcgctggaaacaacagagtcttcagtgtaaccaacaacattctttagcttaccttgagaagccttcttaacagcggccttgatttcatcgtaagtggcttccttagccaacttgacggtcaaatcaacgacagaaacatcgacggttgggactctgaaagccataccggtcaatttaccttgcaattctggcaagactttaccgacagccttagcagcaccagtagaggatgggataatgttaccggaagcagttctaccacctctccagtccttgtgggatggaccatcaacagtcttttgagtagcagtgatggaatgaacggtagtcatcaaagcttcgtcaataccgaattcatcgttgataatcttagcaattggagccaaacagttggtagtacaagaagcgttagaaacaatggtttcaccgttgtacttgtcttcgttaacaccaacgacaaacattggagcagtcttggaaggagcagtgatgacgaccttcttggcaccagcgtctagatgcttttgagcggagtccaattccttgaagacaccggtagagtcgataacgatatcgacacctagcttaccccatggcaagttagctggatccttttcttggaaaacagcaatcttgtgaccgtcaatgaccaagtcgttaccgctggtagtaacttcacccttgtatctaccatgggtggaatcgtacttgaacatgtaagcggcataatcaacagaaatgaatggatcgttaacggcaacaacttctagagcctttctttgcaaagcaattctcaaaaccaatctaccgattctaccaaacccgttaatagcaaccttaaccattgtgtaatattctttttttttacttgaaactgtgaagcgtgtgtgagacgtatgataacttgaaatacctttgaagagtagttcttgtccttggtgttttgacttaaaaaaaaggttaataagaaatataattactattaagtaatagtgacaagagacaagttgcaattccaattctgattcaaaatgaaaaagatccaccctttatatatcaaaattaagtacaattaccaataaccacactagtacatattataatgtaataatataaattagatatccctttatttcgcagcacattgtgctcattagctcattggcccatagagaagatgaagcaaagcagtcgaagcagtaccagtgtgccatagagaacgtgatgaaatggtaagttatggtacgtgatggaacacgggaataggggcgggacatttgggatctggtgaaagtgttgaattatccttcaatagaggaagtccgtgattttctcttcctgtccagtggtttccagtgggatcggtggctccactggaagctggggaaaccattgggtttttgtcctctttttagggacagagagttctagggcatggacaatacgttaccgagatgagggacatccactgttctgttctaacaaaagaagatgaaatgattatcttccggactccagcttttccatttgccttcgcgcttgcctgtacggtcgttaccatacttacctttcttgcttcttctcaaaatggaatccaggtttttagcttcgtgtttcttttttttttttaccatttttcaaatttcagtcttccattttcagcttcttgtttttttttttttttttttttttcatttcagtttttacagcttccagtctccctctttccttcgatttccatcttcttgtttctgtagccatcttcctatcacgtgcaagggaagaaagtgggggcccagcaccttcttttttgttctttggtgggggctcgttttagtttttacgtgcgtaattgggaatcttccgaggtagtatgacatgtccggtggtgacctgatactttctgtttctccgagtaggacagaagaggaaaaaaaaatagcgtgtgatgttcttctattctagtagtgtattgatctattcacaatcagatcacaatcatatgagcagatgatgtattttgggttgcttttcaccaacccaagtattcgattgatctttatatactgcggttatttctaggtcttaaacggttaacacctgttgcagggtggtatgtatttttctcaaagtgtgctattttcacaccagctagaaatcagctgtcttacttgtatacaattagaccagccatttggtcttctggaatatgtatataaacacccggtcgattctgacaatccatccacttttgtagtaggtctctctatatccatttgtacaatgttgtttctgttttgccctacatcatcatcaagcaaaaacaatagtttcaattgaaacataaacaagctttaaacacacaaactctatactaaaaaaagataaaatggccgcatctatcccagaaactcaaaagggtgttatcttctacgaaaacggtggtgaattgcaatacaaggacatcccagttccaaagccaaaggctaacgaacttttgatcaacgtcaagtactccggtgtctgtcacaccgatttgcacgcatggaagggtgactggcctttgccaaccaaattgccattagttggtggtcacgaaggtgctggtgtcgttgttgctatgggtgaaaacgtcaagggctggaagattggtgacttcgctggtatcaaatggttgaacggttcttgtatgtcctgtgaatactgtgaattgtccaacgaatccaactgtccagaagctgacttgtccggttacactcacgacggttctttccaacaatacgctactgctgatgccgttcaagctgccaagatcccagtcggtactgacttggctgaagttgctccagtgctatgtgctggtgtcaccgtttacaaggccctaaaatccgccaacttgaaggccggtgactgggtcgccatctctggtgctgctggtggtctaggttctctagctgtccaatacgccaaggccatgggttacagagtgttgggtatcgatgctggtgaagaaaaggctaagttgttcaaggacttgggtggtgaatacttcattgatttcaccaagtccaagaacatcccagaagaagtcatcgaagctaccaagggtggtgctcacggtgtcatcaacgtctctgtctccgaattcgctatcgaacaatctaccaactacgtcagatctaacggtaccgtcgtattggtcggtctaccaagagacgccaagtgtaagtccgatgtctttaaccaagttgtgaagtccatctccattgtcggttcttacgtcggtaacagagctgacaccagagaagccattgacttcttctccagaggtctagtcaaggctccaatccacgtcgttggtttgtccgaactaccatccatctacgaaaagatggaaaagggtgctatcgtcggtagatacgtcgtcgacacttcaaaataatgaaatctcttccgcattcaagtcatgacttttttcaccttttatatgtttccctcctctctccgtttatataaaacatatctgatcattacttcccacttattccgcctggtgtagtgctactagatcaatccaactttataataaatcattttatagaccttcaaaatgagacacgatataatactttaattctttagctcttttataataattcttaccacccaaaaaaaagggaactaataacaccattataccattacagtacacattgcgaccatcacccttaaggtgaatacatctgacccctaaaacaactggtacgttccaactagctgacctcttaagtacatcgacaatgttcgcttcgaccatcacactgtacgagttgaagttccatgtctaactctgtatacattgtcactgggagcgagccagacacggatctgcatttctagattgaaaaactgagaaagtgaaaaatttggaaagctcaaccagaggtagagatagagatagagacagacataaattaagctgagcagtctttatcttagtcgcctgaggtctttcgtgagcagtttccacagggatagaaggggagactaaaaccaaagatcagaaaaatgttctcacgtttaactggtgtctctttgagacagggtcttacggtacagaaaagactattctcttatgccaggccattgtttaacagctcggggtctgagaggaccggttctggttcaaggcagtacaatgatggcgcccgtgctggtgcagaatatggttacacagggactagaattgtgcctaagttgtctactttttactccgccaacccacatcacgaagctcatatcgataacttagaagcgttgttgaggaaatatatcaaatatcctaccgtccaagtggaagaaaggccttcctggttgagtttgcaagagtacgctctaataggtggtgggtcccgtttgaaatctacccagtataagcagcttttgttcatgttgaaccgtttgaattctattgatccacagttggttaccgatgagatttcgaacactttagcgaaataccataagaagacgaagttgcaacctcaaagagatactttgaagcaattagacgagtttggtagaagtttggccatcggaagaagaaagacctctactgccaaggtatatgtggttcgtggtgaaggtaagatcttagttaacgaccgtcaattaaacgattacttcgttaaaatgaaggacagagaatccgtaatgtatccattaaaagccattgacagtgttggcaaatataacgtctttgcaatggtttccggaggtggtattacggggcaagccgatgccttgatgcatgcaatcggtaaggcattggttgctttcaacccactattgaaaactagattgcatagatccggtgtcttgacaagagattacagacacgtcgaaagaaagaagcctggtaagagaaaggcaagaaagatgcctacctgggttaagcgttgatctgatattagtctctgacctttccattaaaaaaaacacatgcttgtttcacaagtcctgtacatatatagcaattttacataatttaacaagctcctttcaccttttactctgtcgtcctacgttagcatctcgtagttccattagtcgtagtttcaaaaaatcttgtagatccttgttcttccttgttcgtagtaacatatcttcagacgtaacaacatttctgttagcatgttgggcaaaagcttccaaatcaccaccaacctcacatatctgctggtaaaccagttcagtaagagtgttgacatattttgaattgtattttacatcttctggtagttctcttttgataatcgattccacatagaaccacagcttcccgcgtaactgggatcgtaatctcttctcttcatccatatttgatcaactgaacgacgctaccatgaatagagcccacaggacaatgccaagtcaggaattgccagctcaaaactctaaacgaactgctcaatcgattgtaatcttgtatatcttgcatatcttggatatctccgcattcccaatgcatatcaattatattcatgttttcaacagtttccagaatagaggcaatttgcatatatataacgaagacaacagaatgtttgatatcagataaataaaagatggagattacaaagaacagcgttagaaagtgaggcgcaaacgtttttcgtgaaaattactacttgacgagacactagtgaggtgtatgcttgtgaaaatacgagtcaggttatccttttgctcgaaactgataacttatagagacatcttgttttaggtattgcaaaagaataggttcaacaaatgagcaagtatacgttgtcgttcggtttgcttccgttagaactggattctgatacgaagcatcttttgcccatcagctcaattacaaacttagattctactgtgataactactggacgtgatgggaacgtagttattgaagagactcagacgaagttggctgtgcatagcgattggatcagtggcatagcttgcctatctgccgccaaatttttaacggtgtctcatgatttcactatctgctacaactggaaaacgactatttggaaccataagattgtcggctaccatgctgactatgtgaaggggatagctttaataggattagaagacatgaaatgcagatacgccacggtaggtttggataagaagctaaagatctgggaactggatctttttgaggtggagaacgaggaagacgttgaagctaaattacttggaaaattcgataacaccacgcatcatgatgcagggtctatttattgcctgactgctacgaaggacgtcattatctttggagataacgaaggccgtttaagctggtacgatataaatagttacagtgtgataagaaccatagatgacgcagctggtgtgaacttaaagactttgaagcttttagatgatgaaacaaccgttcttagtacaagcgcagatggagagatcaaactttggaatgttgaaagtggcaaatgcctttggaccaaacagttgtcgcacgcaatatggtcggtagaaggaacgctttctaaagatttatttcttggcgactgcatgggtaatataacgcaacttcaaggtaatcagatatctgttatctacaagccaagcgattgcgacacaaaaacaggtggcattctggcaatggccattatagaagatgtgttgtggttctccagatcaggaaattcggatctaaacaagttgaacttgttgagtaagaagctcacggttatagaaggtggccatgcactagtgcggtgttctttgttgacaaaccgcagacatgtcatcacggaaaatacatccggtgagttggagaagtgggatattgtttcttgtgagctggttgaaaaaatcagccgagacgaaggtaatttcgatgaggtggtcagaaaactgaatcccaaagaagtcttacagcactggtgctccgtttcgataaaacgaggcattctttttgtaaagatcaatgaacgtttcctgaataccgaagtatacggaagtgccctcaccgattatgtaatagtcaacgaggataaagttgacgaaattaatttggacgaaagatacaatttgggtcgtatagctgtcaattcattattacatggttttattgattatgaattggcgaaggataagaaattcagagaagatatttcttccacaaagaagcaaactcctccatctactccaaatctattaagaagacacaactcaatggcctctgaccatacgaaccctgatcaacataaagacaacaaaagtatcaaggagaaaagacgattatctatatttaccaagttcactcaatcaaataacactaccccgcaaagttcggcccccaacacccccaatggtatacctgacgtcccacatacatatcacggcataatcgaagaaagcgaagatgagatgggaatgatgttacctggcccagcaactgctctacctacttcatcgaaaccggcgaacctcactttgacaaggtctgttactgaacaaagtatcgagagatctgctacaccttcaagcacatttggtttccataacagatcatcgagggtaaaactagaaactaacagcatcgatgaccttcatagtatctcttctactgggaatggtgaagtgaacttcaaattcaattcaaagagtttttccaaagatctgtctgaacgaaagccaggacttttcttgaacgaatatatcgaagaagtttatcacgcttatttgaaacaggctccaaactcctcatcaacgttcatgaagtttgggaggcggatccccgagactttgttcatcagagactcaactagacccgtgatacaaatcaagagtggatgcattctcacggtcaaccattggaaagaggggtccacaggggaaactattgcattttccacatatctcccaccccctacatatacggcaaacgacttgatcgataactaccatacttatgaatcattagaaagacatctcccgatatggcttggaaagattcttttcaaagaggataaagtcattaagacgtacccaaaaatcacattcatcatccagccttggaaggacgaggctcatttatcggaggaaacgcaacaatcgccagaggctgaaagactagtagtagaacataaaagatcagggttccacaaaaaatctaaaccacctgaatcacccttaatgctaccgaagattaacgatagcaatgttagattaacagctgcaaatatgataaaggcaaaaaagatcaagacttacatagtggatagattcgaatcaaagacacctgagatgaaaaacaaagaagatccaagcgaatggttagaaatcttgtgcaaaggaacagtactagaaaacgatatcaccctgagtgctatacgcactttatactggaaatcaaacacagacattgttcttgaatatagacgtaaaccgacttaaaattaagagagactgtgagactaagttctcacccaggcttatcaatatatatatatataactaaatatagacatatatacaaacatagaactacacctgccgcccttgactcagagcattccataccaacacaagacaggcacgtgactgaaatcatgaaggacgagtttgatggtttggctctgtttccttctttcatcgcattgaaatttcgaaggtttgttgaagtttttctttttcttttcagccaaaattttccaaaatttagaaagcgatgagaaacaaatccattaatttgttgattgaaatttaagaaaagattgaagttaggtagccgaatagtccttgtaccggttgaaattaaggggtaagattagtttgcatatcgataattgagttcttagtacttgtttgtgcatatcgataattgagttcttagtacttgtttgtgcattttagaatttaatacgaactaatcttcaagcggaaaaagttagtttcataagatatcaaaggcaagtgacgcacaatttttgtaacaatggatcaagagcaggagagaaacatttccaggctatggagagcttttaaaacggtgaaggaaatggttagggaccgtggatatttcattacccaggaggaaatagatttgagtttagaagattttaaggctaaatactgtgattctatgggcaagccacaacgtaagatgatgtctttccagtccaatccaaccgaagaatcaatagaaaaatttcctgagatgggttcattatgggtggaattctgtgatgaagcatctgttggtgtgaagacgatgaagaattttgtggttcatattacggaaaagaacttccaaactggtatattcatctatcaaagtggtattactccaagtgcaaacaagattttaccaactgcagcaccagcagtcatcgagactttcccagaagcatctttggttgtcaatattacacatcacgaactagtcccaaagcatatcaggttaagtgaggctgaaaagaaggaattattaaaaagatatagattaaaggaatctcaattgcctagaatccaaagaatggacccagtagcattataccttggtttgaaaagaggcgaggttataaaaattattagaaagtctgaaacttctggacgttacgcaagttacagaatctgtttataagagcaattaaaaagagccattccccaaccctaagtaaagtaaatgcgtgtgtataataatagaccaaattagagcaagagaaactaatagggccttaaacacactcttcgtatgagaacccatcaggggatatcataatctaattacgattcttttttcaattatttaaggaaatgattaatcacgttttgaacatagcatgtctgaattaagagagttcattgatataagaattcgaatttttaggaaaacaggtaaagatcaggaatggctcacaagacgtgaacataacacgctatcccttgttcccttccaccaggagatatctttcaaattaatttcaataagaggagacacttcaacaccctcactacccaagaaggtggcaccaacggtgatgaccagggcatcgataaggtgtggtctctgtagcaaatcattgataacaatcccaccaccttcaaccatgatggattttaatccgaattgagatttcaattggatgaacaaatcgtgccagtccactttacctgtaaaattagtttgcatcactaaatagtcaacgttctcttctacaacttctggaagctttttcacgactacaattggtgctttaccatcaccagaatcaaacaaagttttcatcttggaaccctcaaacttccatttcccgtttggatctaaaattatgggccttggagaatgttcagcaaaatgttctggttttggctcatcatctggccaccatttacagttcaaaccgggatcatcaaccaagacagtaccacaacccaacatgataccgtcaaacttgtaacggaggtaatgggtcattgtattagtttcttgatgagagataatagttctagtccctttgatcttcgcaatacgagcatccaacgattgcgcataagttaaaataacgtacggcttttcctgttcgcccaaaacgccagcattttccggcatgtatggttctaagaaggaaaccaactcctttttcaatggttgtataggcatggcttttgtcgatgtatatagctgacgcgttcagttgtgattgggcagtgatgttcccagttcttaagcagaaaataaaagaatgaagtttttatcttctaaaacttgaagccaatttcgggttgttttaatactcttacactgaaatatatctatgaattatgaaactctgtgttgagataacacttttccggataattcaaagtgatctcagtccgataaattaaaacgaactctcaaaagctctgagtcaatattatttcaacagcacaaatactagcactcagccaacgttgccttgccaaaatagatcacaggtactcgaaaacaacacgttcccgctgaagggatctttccgcaactaaaaaaaagaaacaacattgtggaagtcacctgtgttaaacataccaaactaaaatcttttgaggtacagtcagttgcatgattgttcctgttctgttgtggaattccttccattggttatgttcgatgataataaaagaaaaaaaacatgacgcatcacgtgagatacttttacagctatgtaggaacgaaggttggtatgtgagtcagtagtagctccaaaatgtttctactcttctatgtatccatattcagtgtcttcagtatcgttattggtatgggaggatgctagttggagttggcctttctgcaaacgggcaggtatagagatatctttctttgaattaacaggatgtctattgcgtgatgatgccttcaaatcgaaggaattgaggttggaatcatcgttcaagtccaattccttgagccaaggatcatctactttactgagctgcgatgccctttgcatctcttgttcttcgattaataactgcttatctaacttcttttgcctttctcttttcaaccttgcctgttgtctctgttcccattgcagttgttcttgttcaggattagtattatcagtgtcatcaatggcaattatttgactcaatatcgattgatctgaagtctcagaggctactatattttccgtatactgcttctgtcgaagagctttagctaaatatgcagctcgaactagacttccgttctcacctgtctcttctggctgattttgctcatctttcctctttctcttgagaaatacaggcttgtgtaacgttacctcatcatcactactgctactactgctgctactgctactgctactactatctggaccatctttaccgctgtcactgtcgctgttcgcttttgtacttaagtgaagttcagattcgttcatcggattcgaactgtaattatcatctcttgctgtagtagatttttcgtctgaagacgaattttcagaatcgctagactcttgcacttgcttcttgaagtgtcgtattgccatttcaactgcttgtttgtagtcaatactgaactttcactcgcttatttccctctttctcaagcttttgacgtatactttcgattcagattgtcatattattattatatcattatcattattctaaacagggctaaaaatgaaacatgattccaacgtgaatatatgatagaatctctctctctgaatgcgacaaaattggattatgccaacataaaagctctgccagaaattaagtatgttatatagggggtagtagttacaatttaaaccaatccaccttgctgatccctgtaattttgaactataaaaagtaaggcggtatgaacatggataaatctgttcactcgtctaaaataaggaaatgtattcggaattgaactaggatctagtactaatagttgtttagtatcttagagataatagatttagcagattcccaagattcatcgaagttgaatttttcattttcatgttcggaggagtcttcattagcgaaaggatgctgttcaccgctatgtctctgactacctttctggctgttttctgacttagcgtgtttctcctcatccttagaatgtttcttttcatctttagaatgtttcttctcgtccttagaatgcttcttctcgtccttagaatgcttcttctcgtccttagaatgcttcttctcgtccttagaatgtttcttctcatccttaggttgcttcttctcgtccttagaatgtttcttctcgtccttagaatgtttcttctcgtccttagaatgtttcttctcatccttaggttgcttcttctcatccttaggttgcttcttctcgtccttagaatgtttcttctcatccttaggttgcttcttctcatccttaggttgcttcttctcatccttagaatgcttcttctcgtccttagaatgtttcttctcatccttaggttgcttcttctcatccttaggttgcttcttctcgtcatcacccttgtcatcgtgttccctatcttccttatgtcccttgtggtgcttcttaccccatttcaacttcaatggttcagattcgtgatacaattcaccatcgatatctccaatgtaagcttggaaaccgtatccaccaacgtagtatagatcttccacttcaaattcgtagaatgcaccatcatggaccaaactttcttcaccaggtaaccatgggatggcatctgggtgtcttttaccgtaacagtctctcaaagccttggtcgtttcaagtttcttcaacgaaccgaaaagattggcacgaggagaactcatagcgtgatgtctgggccttctgtcctccacggtaatagaaagcttgccgttatcctgatagtttctcaaagtggaggaaacgttcatcaagaccaagattgggttacctgtggaattcacaccctcacataaatcagaagatacatagtattctgggaaagtcaccggagtctttccatccttcaaagtagaaacatgaaccaagtcaccatacttaacaacacctctagcaacctcagcagcgtattcacgagttaggttgaactctttctccttatgagaggactctctcaatttcttatcgcacccttcgcgtgcagaaacggaatctaaagctaaagccaaagataacaacaaagtactacacttcatgactgaattattaatggctcaataactgatgtcgttatttggataaacaatctctccgcaagttgtaacccctaagctcatcgctattcaatcttgatagaaggttccttaaacctgtcgttgcctatatataaaataaacggtacaaaatttataatgcggtaaattacataatgcaaactaaggtaaggaaggtgctcagcctcaaacttccgaaaaagtagtttgtttaccagaagaaaacatttttgcagttcacccaagcctttgcattgagattggttcggacgaaccatccgcctagatctcggatctaagtttaatcgcagagacatcgccgcataaccacatcgctccagccaggtgtgtttttcttttgttcttatatgagccggtcctttgctgaaaagccagtctgaacgcaggcccaacgcacacaactcacacacaccctcaaatggaaacgttgaggcattgctaagtagatagctgctatgagccttgtttatgccaaacatgcttatacggttggctgagatccgaaattcctcagaaactagccattacttgtagtgtgaccttgcacggcacatgatgtattgaaacaactcttaagtctgtatgtacttcaatagatccgaaagcaggtggaaactgaccagtagcttgcatattgagctacggggagacttgacccaagtttatggtatcactccattttcatacacgtgaccataaatgaatttcttttcaccgcagcatgaacaaatcgaaaattttaaagagtgaaagaaaaaaaaagtagcgatgagatgagatgagatgaggttcaaatcgttggctttgcaatcatctcctggcgatagatttttgatcaggttcgacttgctagtactccaggcaacggcagagacgatatagaatgtcatctttacgtgatcaattagcgcaggtagcgcagaataacgctactgttgctcttgatagaaagagaagacaaaagttacattctgcgtctttggtttacaatccgaagactgctgctactcaggactatgagtatatatacgatacagcgttggaatcgtttcatactttggtgagtttggacttgaggttcaaagttttcactaattccttattcagtgcatcttccgtgaccattgatagaaacgttcaaacaaaggatcagattagagatttggataacgcagttaatgcgtatttgatgttgatttcgccgaaatggcatctaactccagctttgcatgctacggaatggttgattcgtaggttccaaattcatatccataacgccgaaatgcttcttctatctactttgaaccaataccaaacgccggtgttcaaaaggatcctcaatatcgttaagctaccacctttgttcaacccatttaccaattttgtcagaaacgataagaatccaaccgatttgacgttgatcaaattgtttaacgatatggacttcttgaagctttattcaaattatctgtccaagattatcaagcaaaaagttacctatacgaatcaactgctatttaccacatgttgtttcattaacgtgatcgctttcaatgcgaacgatgaagataagttaaataaattggtcccattgattttggaaatttccgcaaaacttttggcatcggattcaagcgattgtcaaatggctgctcatactatgctcgcggtacttgccaccgcattgcctttgaacaaaagcattatcattgcggctacggaaactatcttggccaatttaaaggaagacgatgctagaaaaaaagctctcgtcacaatctcaaaacttttccaaaccttgaaaggtgtaggtaatgtggatcaattaccggtcaagatctataaactcgttgataattctttcccattcgaatatctactacagttcctgagtaatgaaaacaaatattcctcagataaatttttcactgcatacattaggtctgtcatcagatatgatcatgataaattgagtcaaattgtcaaaatcttaaggaagattaagttggaaaaatacgaagttagatttatcatcactgatttgatacatttatctgaagttctagaggacaagtcacaattaatcgatgtttttgaatacttcatttccattaacgagggactagttttgaaatgtcttcaagcactaaacctgaccggagaagttttcgaaataagattgacaacttcattattttccgtcaagaacagtgcggaacaatctggtgaagatatcattaaagttctagatgatgctaaagcatcaaccgcgaatggttcagctgttccatttaaagatttcatgaccaaaaactcagagttcatctccactaaagcggagtctatgcttcttgttaaagatgaaaagtttgtcaagctgttgtcattatttgtggaagctgtaagtaaaggatatcaaccaggtctatttttatcctccttcttcactactttagagagcaggataacgtttgtgctcagaatcatcgtatcccctggttcgcctgttgctctcagattgatttcactaacacagttaagcaaattcatcaatggtatagatgagcaaacggatcttttctctttggtacctattctagtgacagcattgatggatatttctagatctgttcgttccaacacgaaaaaggttctacaacagatagccaagagacctttcacagcaaagtatttcctatctaacgtactctacggagagaatttaaaggtgccaatgttaagtccgaaagatagcaagttttggttgaccaactttttaagcgattacatcgttgaaagtacagatatttcatccctcgtcattccatccaaaaatgacatggtatatatgctgttttggtgcaaccaggcactgcatcttcctctcgcctattcgaagactataatgttaaagctcttgaccgctgtgccacaatatgcttttacatattcaaaggtgttcgaacaatttatggccacatacatcacggaaagaagttcctgggaaacgaagtgcatcaaaaataaaaccaatttcaaagacttcgaaactgcggtatgtgccattgttgcaccaaaagaaaaaaacagtttcgcgatagattttttgattaactgtttggaatcagaatatgaacaactttcgaatatcatggcagacagaattttatctttgtatccaacattgaaattcccaaaccaattaaaaattgttcagagtataatagactcctcagttgacaaagaactatcatatgatggtctagaaacccttcaaagtcttccattaactgcagatatttttgtctctgtgttgaaaagtaataccataaacagcgaagatcaaacagatttgactaaacgtagaagaagaagatcgtctacggttaacaagtccgccctacagaaacaagatatttctcaaattgccgaagcccacctaaagaaaatgactattattctggagactttggataaattgaaggtaaagagtaacgaaaatctattgaatgccttattcaaccttttgtccgacttggaaactttagaccatgatggtggtttgcctgtactttacgctcaggaaactctgtcctcttgtcttttgaacactatttcttctctaaaatctaacaacggaagtatgaaattaccctctattagagcagatatactagtcgctgccattagatcatcaacatctcctcaaatgcaaaataagctcctattagttgttggagcattggcttcagtatctcccgaaactatattacattctgtcatgcctatttttaccttcatgggtgcacatacgatacgtcaggacgatgaattctccactctagttgtggaaagaacaattagtactattgtgcctgcattattgaaatcgacggaagttacgaacaaatctgacgaaatagagttccttctaatgagtttctcaactgcattttcccatgttcctaagcacagaagggtgagtctatactctactttggttagagagctcggaccttcagatgtgattgctccattcttgttcttaatagctcaacaatattcgaactgcttggaaaagtttaaaatcgctgaatctaagaattacattgagttctttaaagcttttttgagtaaattcgatattcttgaacaacttcacggattcaatgagttattcaatctagtcgaacttttagacgaggacagctcaaagaatgaggttgctccaacgaggactttattctcaaatggtatagtaaacatgtctaagtcggagctctttgtgttgaagaagaacgatcttgatttcattgataaggtcattggagagagcaaatctgactactataatacatctagcaacctcaaattaagaatattgagcacattgctggacccaaatattgagattgaggtcaaaaaccaagtcagaaatgaattcagtattcttttgagtaaaacattaaatgcaattaacatgacagatagtctttcatacgataaacactcatctgcaggatctaacgatgaagaagcgggttctgaaagcgaggccgaagtcgaccaaaaagagttaaaagacattttgttcggattattggaacacgtcctagatttgcttcctattcaggacttcgtcgcatctattctacctctactacaaggaaatacggatgagtccgttagacatcatttaactgtagtgacatctaacaagtttattgaggaacccatggagtccttcgaaaccgccaatgagatactaagtactttggtggaaacaacagagaaagcctcagaatctacccagattttacaagttactttgaacaccatcagttcaattgttaccagatttggtgataggctcgactctcatttattggtgaaatcgatggaaaacagttgcaagcaattgacttccaagaagatcgaactcgagatctcctcattaactgttctcacgactctaatccaaacattaggtgtcaaaactctggcattttaccccaagattgttccggtcgcgatttctatattcaagacctaccaaaatgccaaaaataaccttaaggaacaattgcaacttgcaattgttttactctttgcctctatgattaagaagattccaagcttcttattatccaatttacaggatgtttttgttattcttttccattctgacgaggtcgctgattctgttagactatctgtgatatccttgatcgttgaacacattccattaaaggatgttttcaaaacactgcagaaagtatggacaaatgatgtatcaagttcaaataattcagttgctgtatccttatttttgtctatgttagaatctgctgttgaagctattgataagaagtcggcaacgcaacaatctcctgttttcttcagattattgttgaacttgtttgaatacagatctatttgtaccttcgatgagaattcaatcaaccgtattgaggcttctgtccatcaaattgctaatgtatatgtccttaagttgaacgataaggttttcagacctctatttgctttggtagtaaattgggccttcaatggtgaaggagttacaaacacaaacatgtcgaaagaagaaaggctaatggcattctataagttctacaacaagacacaagaaaacttgaagtcgatcatcacatcttatttcacctacctcttggaaccaaccaacaatctactgaaacaattcatctcgaaggagaccgttaatgtgagccttcgtcgtttggttttgatttccttgacatcttctttcaaatatgatagagatgaatattggaagtctacctcaagattcgaactgataagtgaatctttgattaaccaattgaccaatgtcgaagatgtcattggtaaatacttggtgaaggccattggttcattagccacaaataactctggtgttgatgaacataataagatcatgagcgacctaatgatctctcacatgaagacgtcatgcaagacaagagagaaattctgggcggtaagatctatgaagttaatctattctaaggtgggagacggctggttagtattgttacctcgtttggtacctatcatcgcagaattgttggaagacgaagatgaggaagttgaatacgaggtaagaagcgggttagttaaggttgtcgaaagtgtaatgggtgaaccatttgatagatacctaagttaaagaatttcgaacgcatttacgtcactcaatcctcgattgaccggctgcgtgtataatacaatcagatagccatgtctcaataaaagataagctgtaaataaattttgtactttaaatttaaaactaaagcattaaaagtaagacatatctataataatataacaggtcactcagtacttccttacatactaagaaaagagatttcatttctgttctcttcgatctttcttttccttctccacatactaggagcacatcttcaaatacttctcactgttttcaaatatcaaaattaagaaaacaagctaaagagaaaacgaacgatgtcgcactgctagacagatttctttttgcagtcactggtggaagagaaacattctctcgacgtcgtagtcccttaggtgagccagcaccgataacgaagcaatgtccgatcttcctcgtacgaattatgacttcaaacccaatcgtgccgggggagtagtcccaatggtaatcaagcgattattcaaatcaccgaagaatttagatttcgagacagcatcatgggagatgttcaatttggtttttaaaccgagaactgcatttaaatcattctattacaaacgtcagacgacagaatcatgggctagggatgatccttcttttttcattttacaaattggtctgcttactttaagctcgatggtttggtctattgtttatggccacagcttcacccaatttattaagatgatgaccaacatgatcattatagatttctttgcatttggagcattcatggctacatttttttggatcatattgaatcgttcattttttaagtttagaagtgcgtctagtgcaagcgttgaatgggcttactgttttgatgttcactgcaatgcatttttgattatttggtgtttgctatatttcttacagttcttactgctaccgatcattaaactacatgcttggatcagtctcttcgttggaaatatattatactgtaccgcgttaggatactatttcattttgacattttatggatatagtcagttgccattcttgaagaatattaacttcatacttttaccaagtcttctgatggcgttactcttccttctaagtttattcggtatcaatctagctgacaagttcagcttttataacgaagcctgatgtaacatttatgaaaggttttgcaccgtaacttcagatcaatggaaaacctaataaaaaggcatcttataaataatacaacagattaaagatctcgtcaatgatacgtaataaataaaacccaccttatacatagatataatgacgtttgaactaaaataggaatagaatacggaaccatcaagtatttctatactgtttatcaaatgatttatcagagggtgttgatgctgacagaaagttaccgtttgtgagatcacgagtaggagactcataagctataaactcctttctctctgtatgatgccatatttcttcgcacgactttttacccctcacgaggatggatttcagttcaccatctttcacagccggaaagtcatcaaaatgagttaatgcatctagtgatacgaaattctccaaagtcagcgaagaagtagaatctggagatagctcccgtcgctgctggaaagtcgagttcttcccattagacttaattctagcaggttttttctctcttttctttataatgttgctcattctcgacactaagatacttttgcagttatagttaaaccgttcgaccattttacattgcaaatttaattgctggtacattaaattggtagaaaggtctgaattaagccaaaatttcccctgtgcagtgattttccaaacatctttctgtggtgatagcgaattgttcgaaacgctggagtctgcagagtggtttaacagataaattatatcatctgttgcatgaatagagtttcgagtttcggctgatttgtctctcagatggtctaatttcaattgcgttctagaagtataatttattgaaggcgtattgtttgtcaaatcagaattgaactgtttcaaggtcaaagaatcacgtcggcttatggaattagcaagttcaactgcagttcctttagtgaatggtgattggtttgaactgatgggactcgggttgttcatggactcaatcgatttattagtttcgaacttattctctagcgtgtagttctcgttgataggctttttgaaagtttcttcagcagtcaagtcagttatcacagctggaactggttctaacggagaattggttcgtgacgaagaggaagaattactattggtgttaacagtcggtatgcaacgagcacttgaactctttggtcgtaccgcgtaggtcttctggtattcgtatctgttgatgggattcgaaaatgttttcctcaagggttctccagaggatactctgctcaatgcagaaacccttctatctttctggtcagttagaactagacattgagcctgagattgtttcttgtttctgatggtatttaacaactgatgagaagagctagtcaaatggaatcgatttcccttctgtttcggttcgctactcgtggggcttgtcccctctgttttcagctccggaacagtgtataagcttttggtagttttcagtgacgactgtctggaatgcttcaaatgggtatgattactaccctgaagtaaacaagaaagctcactaaagcttgttttcttctgtgttgtgttcatcgattccatccatgctgtttctcttgttgtatgtcaaaatgagtatctcttaatggtacacttaaaatgaaacgcacgttgtcaaaagtataagtcataccaatgccaattagaaactagttgttcaccagtttatatatatatatatgcgagcaacatttgtaccctgtgtccaacaatccctttaaattatctgggcaattgatccacgaattcaatgcaccgcatataatttggtgataactaatagaaggagatgcagggcccttattctcgtgatgaaatttttccctacattttttttgtcaatttcaaaacgtaatggataagagatgaacacgaacatacacagatgaagataacatcagatctgatcgaagtcaaccaactgctgattgatatagcaacccatttttattgttccttgatttactgccattaacgtcctagttttgccctgagggaaagttcaacagttcaactggtacgtttgtagtaaaagccataatcaaagggaggttaccactacaattgattctacgcctgatctgttcctacctgataacgatcaagccaaacttttcaagcattttcgtcgccatatgtcctgtggttcctctcgaatcaaatcatttcttgcgataaggaaaaaaaaaaagtagaaatatggtgaagtgagattcagaaaatgacgtagcgtagatgttctgtaagataggtaggtatagaagagtgtattcatcgacgaattcggggagcaagcccttgttacgacaagtgggaaacggacttagtatacggaaatagatatggcagtaagtaggcaagcttaagggaagaagtactggttgcgtgatgtttcgatcacgtgcattataactttaatcctttcaaacacgaataaatcaatcgtatatatcaattggtggtaatctatcgacgttgtagaaccagttgttagattccacctctttgcagagccagtccactgggaatactaccaaatggccatgtatacgttccaataatttttttgcagtttcacgatcgaacatacggtctttcgtaccgtaaagaagctgcgatgtcattttcatcttgaatatgttgtcagtagctgcatgttggttattatattgacgatctgcattctcggagtttttactttcttcgttggatacagctcgattaccctcatcaacgctgtccattgcaatatcgctggcagatagttcgaaaagatgtttacccttttcgagagtgacatttgtagattctacctcgcttggaacgcgctcaatggcatccatagcatcatgagacgatgctataacagccggtgttttgcctagtctttttctctctagttgtatggctttatcctggtatgaatcaaagcccttgtaaaacgtttggaattccttatactcccgccatgtttgcactgaactatccggctggcaatggaagaccattctgaaaagaacagtgttccttaaagcaatcgtaaaccatagatcctgagaaaaagactcgcataatggatcatcgaactgatatggatcaatgtattgagcagcagatagattggaggtttgctcgctgattggtggtagcatttgtttaagcatcccttccaccatttcatcgtccaattgacctttgtcggcaaagctgtcttgaaagttttgagttctgtgttttgcaatggttacgtcaccattttttttaacttcgtacaatcctttctccttcttgaaggacaggtattgtaggtagcacaatctcttcaaaagcttccatttgttcatatatttgacgtgggaactgtttaggtactcttccacatttgccctatccgggagaatggatgaaaatctctcgtttgtggctttatctattgtattgttgagaatttcttcgccccaggcctttaattgcttggaaacatcgttgtaaatagctggtttggaatcgacattcttccaattgtctggaccgtgaccatctacatcgcgatcgtggaaggagttatttatcaatcttgaatcagaactgatattcttcttatctcttatgcccctatttgcttctccagcacggtaattaaaggagtggtacgcagacttaatatctacatgaacatatctgtttttttttctttcaggaagaggtgcaggcttgttgtcatttagcgactctcctaatttatcctctgaattgtttgctgtctgtagttgttgaattataccaaaattttccactgtatcttggtatttctcgtaccattgaggactatgtttttcgttgagaatttctctaaacgctagctctaccatagcactttcatttttagtggaatccttcattttactgagtgcttcgagaggaatggtgtttaaagtatttgaattcaattgcgccataattcttagtttctcgaactttctttcgataaattcaaccaagtccacatcacatcctagatgttctctcatcaatctttgtcttaattcgaacgggaatctaccagccaaatactcctttccattcattctggattcaactagttctttatctcttacaatcacggcaacttcactatctctgttacccaacatagatctttcattgatattggcactaccgataatacagctacggtcgtcaactatcataactttagcatgcacataaagttgttctgtcactagcttatcatctgcacctattgttgaccacttccttaatgaatagaattgaatatactggataggatcaatatttaatttcttaagctttgcaaatatcgacgtttctcctctggatattgactgatattggcattgcataataactctaacactagaaccctcagcttcatccacctcagcgttgaaaccaggcattaatggaattacaataaaagccatccaaggttttccttcgctattggctttgacaattctgtccacaattgcatcaccaattttattttcaataactacaccatcccaactagagcttgtcacaaaaaattgattctcgatgtaaatatagtaatcagacgtttctatcagcttcaaatatgcgttttgaatcgaatgctctgtgtctttcaatcctagtgaccaattacctgcacttctgattacctgaatttcacaagtggattggtctttaagttcctggaagaaatatgagttctcgagttcatcttttgtcaaatctgatgctggagttagtaagggagtaggtctactaggacgtttttgtcgtaggaggtaattccatctttgggtaaaatgtctagacaaatctcttgcgggctcaccaactgtcatcatttggacatcatgccaaggcattctaggtaccattgatctgtcatacatggactggaatggcttatctaggtcgtagaagtcgcacactcttgcattggaatagtctttaccaggaaatatctgatcttctaaatccgtttgttcatcatgcaaaacatggtctggagtatcaaatctcccgtaacataaatcaattcctcccacaaatgctacagtattatcaataactgtgaacttctcatgatgggcccagaaatatgtattttgtagccactggtttggagatctgattacatggatattatgatgtaaacttaaaagcgaatgcttagtccaaagagaatctgttccaactgtcgaaccaacatttctatagacaacaatgaagattttgacattctgctctgctttttctttcaaaatacgatcgatacgataattctgatttcctcgcacagggcgtctcatatataattctggagataaccaccaatcgtggatgaaaataacatctttagccattcttagagcttcgctcaatgaccagaagtagtctctaccatcgaccaagaatttgcaaaaacagttttgtctgacaggagcaaaactgtcgaatcgatacttttgtgaccagatcgtagacttcgacatatctataattgattttacccaaagtttcattaagtattcagatttgacaatcatctgcaattttcgctcactattctctaaagttatcagcaactttgtggatattttagattttaaattgtcatgttgaaatggatcgaaatcgatttcttccaagtcgttggtagaataaccagaacatgaaattttaaatttgctatcaacaaggaatacgtctagtggtgttgttgaatagatgtcactcacataagtgatatatgaatgccttaccagaaaccatttcgttgtatgtctctcgatcatagccttgaaatcgttaaatttaaaatgtgaaacacgccagccttgtgattttgcagtcgatcttattaacatatatccttgttttccatggtatccgttctcatagcttaataatgtaccgataggagacatttcgtaaaattggaataatctattggcttgcggtctcaatgatagcgccacgttcaagagtttcaaatatctttcaattctgtaatgcattggcttgttgctatcatcttgatcctgaaacaagggtcgcaagtgctttgactgatacctctcagttgataactgagtggaagatcttggagtaaaattcatttcgggcggctcatgatttccagcattactgttgaaatttttttcatttgacatgtctcttttcttcttcaaatgatcgtcgaatctggggaaatgaggcaaatgcatctcgctgtatctattattgtcaatgtaaaatttgttaacagtattttgttgaaaagaagttaatttcaagcgattatgaagggatgccacatctttgtacgatcgtactatctcccatttcaaacgattttcaccgatcccgtattccatctccagtagatactttgtatgatatccttccttaaaattcggattatctggatttacagatctgtctgagtgcatagacgaggcaatggataaacgtcttctgatattaggacgagaattctctggaattggaagaggtttaacagatattgatactattgtaagaagcaaaggcgctctagtgaccccattatcatctttcataaaaatcgaacctgctagtaatgcagcaggcgaacctgccagcatagtatcgacgaaatcagaggccatatcctgtatgtaaacgtcatgttcgttcatagtttcgtgtgttgcagtggattgttctctttcgccgattcctggccattgatttttggtgacgttagttaatttcgatagtcttcttattgcttggccgaactctttcttccaaaacatgtcttgataattccttcgaaacttcctatttccctgaaaagcactctggttcgtttcttcaacactatcatgctccacgtcttgatccccagagtcagttcttttgtcataaacagaggaatttgggacccccataaacttcaaattcttaacacttgcttcaaaatcagaattatgtgtatcttgatcagtgtttgctctgttttcagcagcactactctcggcatccgtataactttcaccatccattgattgggaactagcctcattcaatgttctgcttggcttttcaagtccattttcagatacattctgcatcgaacctggattccttctcattgacaactctccagcctcatccttaattccaggaatgacctggccatgatactcagtatcctggagcattttctctcgtttgcaattcttatatcccctcacactcaagtaaagtaatggcagatatattactgcgcaatgatttacactaaatcatctctcttggaccaagttttgtttcatgtagtgtgttatttatatctgtatttattttacgtgtgcatttatgagggcggttgcagtcagacagaaataactaatcacgtgatttgtatttttttctttcgaaagaagaacatagcgttgctctgcctttatatttttttgggatcccccagaactttatatttgggtcggcccaaatctggttaaccacatagacgtgatacaatatatgtaaatatacggtaatggtacatcgttactggagaaataatatttcaccattgctgccttaaagtagccagcagtgcacctttcgcgaacttatggattgtccgaataccagttccagccccttcactagatggaacttttcaggacctacattgtacctacattacaaacaaagcgtgcacgattagggatacattgacacattttaatcagtatccaatcgtaaacaagaataataccagcttttctagaaaaatactacccaagtttcagctcaacaacccagactcggttctccagctccatagattaagagaaacttccttatcgataaagatatcccgcacgtaaccgatctatagttctgggtggtcttttaggtcagtcaattccgtggccttatcaacgataaggaaaaacgaaaattttgagggaaagagaaagagagggagataggccaagaacatccatattacccggatgcattagatatcatttctacgggccgttcttggttgtttggccgaaatattattgttacccggatttatcatcgattacttggaactggacattacattcttctgtagtagtcctggaagtcatgatagatttccagcactagctacaagccacacgctgaagatattgcattctatatttcatgggttctcttatcgtcaggttgagccgatgatcaaaaacagaaaatatgggccatcgaaaaagatttagtacagctgggtctaccatcttatctgtacgttcactcatacctgctgaaatgtgtcaaatcttcagctacttgaaaggcccgataatctatgatgacagacacaacgtgtctgctatctggatgtgaaaaattccagccatttctgtttcctgtctcgcttgatatcaatattggctctctttatcgcgaatattttcgttcagtatatatttgcatacatttttttttttgggccacctgtgatattttaaatttgtacctttcttatctaacgttgagcatttttagctatatactcatcttataccgtcacgttgggtcaaaaggaacacaggattgcattagactccatataagattggggtcacttgggtttcagcttagtctcggctttatcataagctcatcgtcgataaaacccttctaagagttgagaaaaaaaaaattcatcaccacatatcaacctgtgaagaagatctgagtgtttggaaataaattatctattgaagaattttcctttgatctcagtttcttgacaagataagcgcctttagttactagttcagccttcattcccataccttcgctagttccgggatttacagtggcattgattctatcagctacaaaacgtactgaatattttggttttgttttaatcacttggttaaatcgaagatcaaagaagtagtaatcgaaacaaaaaataaaagagtcagctttgtactgctccgtcagtttcagtttacgacacataccataaacccttgctactttattctatattttggattgccattctataacaattcatgcttctgagaaacttgttatcataaaacggtcatttttaagcacagattgatgatcagtttcgaagttcaaaagaataaagtacgagattagcttttttgtttgaattgagataagagcaacctatcatttgattgtttccgctgaagtatgacacttgaagaaaaaagtagtaccgtgattgcggcggtcaatcagcctgccgttttatccgatagtcgtgatcagataataaacgacatgaaggaacagaaaaggaccgatcctgttgctgttttgtatccagtacggtccaatgattccagtgcaagttctagtcggaaaagcggctctgatgctcgaaacatggatgatacgataaaggacatcaaaccgaataatcctgcaagcaaccctgtctgtaagaactgttatacgtcaactacaccgctctggcgtagggatgagcatgggtctgtcttgtgtaatgcatgtggtctatttttgaagttgcacgggagaccaagacctatcagtttgaagactgacgttatcaaatcccgtaatcggaagtcatctcatcacgatagtccgaacgacaagaagaggaaagaccccgctttgctaacaccgaacagttctacaaagaagaaaaaaaacaatgcttacaatatgaataatgacattgttacacagaatgacaatgcacatcaaaaccaccaagctcagacttctcagcaatttccgcagccattaacaccccaggtcagttggcaaagtcaaaatgttgagctctctgaggatatgaagttccataaaatcctgccaaagaataaccagggcaaaggcaacccactgccacatctatccaacattctgtccgtttctagcgctactcccatgacaggtgacttcccaactccaaattcccctagattatcacatttacacagaccaccgccacatctagccaccatcaatgagatcttatcgaatagcaacgctcaacatatgtctcagacttcacctccggcgcagtttagtcaatcaacagttgggaaaccattagacaattcgagctctaatcatcagcaacaacaaggcactcaacttccaagcatcatgagtaaccattctcaacagtcattacaaaacactgccgtactacctcctgctcagctgccgctgcaacagcaaccacaacctcaactatctcaaccattactgatgcaacaggaaagtaaatcttcatatttttctacgtctcctcccccgctagaactgcagcacactgtcgctcacagtacgtcttcatcatcaagtaacctgcattttaattcacaatctcaacaacaatcagttcgccaacaaccacaacaaaatcaacgcccacaagaatcagctgcgtcgaaccaatgtacgcaatcgagcgctaatgttaccttgtcaaatgatatactgaataattcacatcctccaacctcgccggtaataaaggaagaatctaaaccctccgtatctttgattctgcaatctcaagaagaagtaataaaactgaaaacaagaattagcgaactagaactagttacagatctctacaaacgacatgtctttgaactcgattcgagatgtaaggcattagaacaagaactcctatcagttcatcggcaacaacaaaaacagtgaaatttcagctgtcaaattttgacatgtattcctatccactgttatttctgttacgttaaaacatttaattctcatggtatgcggtacgataactatatagtgtaaatatctatacgcgtttcttacacattttaataagcatagatgacaacatatcagtccgcgtttgactatcccatctgtcatatgcaatcgctaacggattcttccaatactgtattattggtagggtaacactactatgatttcttgaaatcgcccttctatctctcaacttgaatttagaagagagagtggattaaggatggagttactattacagtatgttccagaggaatacgacgtctggtcccggtgaaacaggatcataatattggaaaatacgctttgagacatttctatactcgaaagataattttattcgtacgttctaattcggcatcatgtctcgcaattctatgaacttggagaatactttatttcaattgaaattcactgcaaagcagttgaacaaacaagctgccaaggctgccaaagaggagaaacaggaggttaataagctcaagaagataataaatgagagtgaagagattggtaaactatatgcgtctaatgctatcagaaagcgcaatgaaagagtccaactcttaaaattggcatcaagagtagatgcagtcgcatcaagagtacaaactgctgtcactatgagacaagtatcaacgtctatggcacaagtatgtcgcgggatggacaaagcacttcagtcaatgaacttgcagcagatcacaatggttatggataaatttgaacaacaatttgaagaccttgacgcaagcgttaacgtatatgaggatatgggagcgaacgcagatgcagttgtagtcgatggtgataaagttgacgaactaatgaatcaagtagcagacgaaaatgggctagagttgaaacattcggctgcattaactgacttacctgatgtaaaggaagcaccggctgctgtagtcaacgaagaaaaagaggataagcttgcagaaagattaagggcacttcgtggttgataatagtgttcaatatactattaggaaactctaagtaagtagtgtacatggtatattaattacaggatataagtaggaagaatttaacttattgcattggcattggcattcctcttcctctagcaccttgtggaggagccatactagctcctgcagagtcactctctttattcttaatggtttcatccacggacaaaatcaggttggtagcttcagtagcactgcttagggcattaatcttgactaaagcaggttcccagacaaatttgttgaaattatcaccgatggtttcattgtcaaaatcaacaccataccacttctcacctttactgtgagccattcttagtctgttcaagatttccacagagtcgaaacctgcgttttcacttaactgtcttggtataacttctaatgctttggcaaatgcattgataattaattgttgtttaccggcaatggtctttgaataatctcttagatattttgagatttccatttctatagcaccaccaccacctactactagtttattttgtagagcccttttaacgatcataatagcatcatgtagggatctttcaacttcagcgataacttgttcagcaccacctctaagtagcaacgtacaggttttagcttgtggacatcctttgaaaaggttgtaacgttcagaaccaatttgcacttcttcaaacagttcacaagttcctagatgttctggttttatgtcagaagtggtagattgcacagagcctccgacagcctggataacacggttcatatcttcagttgcgactctaccggcacagaagatgttcctatcagcaaaatattgagtggccaagtcaccaattggtaatttagataaaatgatgttggcacctgtgtcttcaatttgttgtaacttatccaaaatgatttgccattcagcatcaacgatagcttggtaatcttcgacatgttcaactctcacttctgcattatctttttctgcctttagttctaattcaacgtttagagaaaggatcttaggattcttgaaagtctttggttgttgttcgaacccagcgtacgagaaagtcttttggaaggcgacaccgtcaacgaataaagaatcttccatagccccaccagaaatctttttgataccaatcaatttatcatcaagatcttcttgatctaatgttaacactgcatccacacacatcttcacaaagaaatcagcgttattattgattaacttagaggacatcgcggttctagcacaacgttctagcaaatctcttgaattgttttcattggaaatatcaaccgcaatttcattgattttagctacagccagttctactgcctttctgtaacccttcatgataatatgagaagagattccttcttctaagaaaggctttgcttccttcatcaattcaccagctaaaatggtcacacttgtggtaccatcaccaacttcagcatcctgagctctggaaatgtcaactagtgtcttcgctgctggatgaacaacgtctaataatttaagaattgtagcaccatcgttggagatagtcgtcttaccgttagatgtcacaatcaatatatcagaacctaacggacccaaagttggtttcaacgtatcttgaattgccaaacaggcattgatgttagagatgatttggcctctaccctgggaggaatcggttccctccttaaggacaacaatagtaggtgtttgattgccaaagttcattctcaatagctccttggttgctggtgcaatagctctgttttgccacccgatgaacgaatatcgtaacaatttctcgctgtgtttgatttaaaaacagagtagtaattaattttttattaaattcgatttcgttgaaatttcatataaaagtaacaggcaacagtaatattggaaaacaaacgaaacaaaaagagggccaaactagagtgcgtcttagtaattggtgacaaccaggtccactttatatagaaacaacagagagtaagacggtctctacagaagataatatttgagttgcaccggtatatttagtgacggcggcggttaacgcttttttttcctctctgaaacgtcgttgaacgctgaaacatgcgcgtagcaacttcgagatgctgttttgcatgaacatggacgtctttaacatcttgaataatttgtataccgttgtaaagccatatattgcaagtgattattctaatataatctctttatgagacggtatctacattatagtgtggacattctcaactaataatcacgaaattggttgtgtggccgagcggtctaaggcgcctgattcaagatacctatcttaaccaaccttacagttgggaacactcaggtatcgtaagatgcaagagttcgaatctcttcgcaaccatttcttttttgttaaatcttagatttttttggcttggaagcatgtcttgttagtggcttgtagctagaaacattctactgcacgcgaaaataactagcaaggtattatgaggatggtctttttatactagtgagttatatacaagtgatcacctacattgtatgctaattatttttctatttaatttatggggaatagtgaagaatatttattatttttgaagtaatgtgccagatgacggcaaatgtcataactctcatttcagctgaaacaattttgtaggtctaaattgcccaggtgttgatgtcaccattcgagcgcccttctaccaaatatccgtgtttgtatctaacaaaatccacgttaccttgttcaggatcatcttcgccgcagaaccagtggttaccgtctttcctgttgtaaattttcacagtaggctcattgtttgaaattacaatcttatccagatcgaaatgtagagaagtgatcggttgctcatatgcaaatacgtcagaaagtataccagttcttaagtcccatattcttatacttctgtccattgcacctgtaactagattgaccgagtcgaactgaagggaggtgatggcgtcagtatgaccttctaacatacgtactactttcccggatcttaaatcccaaagccttacgataccatctttagtacctgtcgccaaggcagcatcgaagcattgtaaagctccaatagccggcggttccttggttagaagtacactattacgaagagggatgtttctttgagaccgcatagggccagttgcgaaagatatatctatggtttgggtgcacttaccactattcagatcccattgacgtactgtcctatcctgagaaccagaaaccaaattgtcaccgtcaaaacttattgcggtgatttcatcaacatgagaatcaaaggtatataaacatgcatcattatcttcagatgaatttgacgcttcatcagccatggccttatcgatatcccacaatttcagaactgcgtcccgaccaccagtaatcagggtgctatattgatcaatttgcatgcaactgatagatgctaagtgtccatgcaatgtagcaatttgtttttttttacttaaatcccatacttttaccgagtgatctagactgccagcagagcacatagtaccaaatggcatatcaaaatctaggcaagtgatatcttcatcatgggccttaggaaggcttgtaatcttagatccggaatcatagaactgttgtaaagttggataagttttacggcggcgattacggtgagaaacaccaacatctttaatttttttggaagtactatgtttcttcctttcggaaatatccgatttcttctcgtggtcttgtagctgctgatagatggatttggaaagcaatggagagtgctcttcttctttgttttctaaaggagtggtagccgcagtttcatatgtttcgttagtttctccagttttaggcgaaagttcagataatccatttatattttcttcatcctccgatgagtattctttatccatgttgtactctataatcatatcgattctatccttaacgttgttcaaatgcttctccaaaaacaattcatgctgctcaattttagccactcgcttgaatactagttcacgcatcatttttaacttttccagcttgatatctagctctcttatttcgctagctgctagatttttctggatttcaagtaaatccaggttatcggtgattgacctcgaggcatccttcaagaaggatgcggagtaagaatgcagaagtttatcagcttttaaatggtctggcaaactaaactcttcctcttgttcttcttcttcagcgtaaactgggatggactcagagtctgttaagggtttcatatcgctattcattataagtttttgctgtagttctatcgtttcattaataacaggtaaagatgcttcaaatccttgaaataacgtcggttcttgcttttttgactttgcagatcttttctcgccattttctgttatcatgttcttgttctgaggtatagtgtctcgtggggcgtcttcaagtagatcatcactcaagtaacttaaaactttgaatgttgtttttggatcactataagagtttttaaagaactctttgctattggaatatatatcttggaaacctgtattcttgcctttagataatttcacgtcgtggcgtactttaactagtgatgatcccccacctgcattagtaattgtctcatgaagcaatttcttatatggactactgtatgaaagaattgtgtcttccatcggctgcgacgagaatagaacagacgccgtggtagacagtgcctttcccagattggcaaactggtctcccgtattagaactcatagttctggcaccactaacactcttatcgaggcttttgctcgcaacatatgtttctttaagatttgaagttgtaataggaactaacaactctttgtttccatgtatctacttttttgtactctgaaattagaactttcattgcagcaataaaatcatatgaaagaacgaaaaccgtattctctgtagaagagcaagatgccgtagaaatggaactacgatatatttcgttatcataaaattagaaccttaataatacaaaaatgatatatactgaactgaaacttacatgaatatttccattccagtgcgagattaattcccgaagtgtgaaatatatctttccacttcatttcggcaagcatatcggtttttcttggatataacttattaatgtatcaaatggatttttagtaccgctgctagatttcacttatttctcccttccaaaaggtccaactgtttctcgagcttctgtatttctttctcctctttatcgatgagagatgatattgacgttttttccggtaacgcttcgtgttggaagtctaactcctggatctctactttcttctgaagttcattaatatcagcttgtaatccattgtatatttgcattagtttttcaaatttctccttgtattcagtgagaggccattgatctataatttcccggaacacagataatataatcgagattgggaaatcttctacgaaaagagttttccttcttgatacatcctcgccagttatcacacttccattccgcaatgcatgaagaaattgcttgatttgttcgtccttgctgaattttttcaatagcacgtcgtagattcccagctcatcgctgttacttccttcgaagataaaatctcttgcaggtttctgtttctttcggatgacatgatcgttttgactgagataaaaccccttcggtatgtaggtaataggtcttggatctggtaaacatagtgctctgttccgtttcaaagttgcttccctctccaagagatgatcgtatatccctactttcccatccttacgcttcatatttccatcgttatctgtactgtataatgacatttcttcaattgaatcgccatctcttataagctttactataagatctgagtacactttgctgttgcctggtacaatcgcatttctaaagatgcctggcggtttgaaatataaggtcgatattgactccgcggattttgatatctgatccaggcagtaatctaatgatccagacatcctttgatgttgttaaaaaacactacacgtacagattaggcaccaccctctttcaggaaactgctatggaatacaatatttcatccaatactatgtaatttcttgaaatactccaaatgattcatttatcttttaactcgattatgtttacattttagtttttttgttttcggtgtttacgaaatctttacgtgaaaagagttggcattatgttaatggaaaaggttgacagaagacttttaaggctcatgcggcctttacatcggggtaagctaagcgagaactattgcttactttattctatatatgatgataaataaacaagaaaatcagaattggctattattattctctccatgcgatataaacctcatcggttctaaacttctgcgtgacaatggtttcagaaagatccttaacaaagtggcctgttctgtactctaataggcctgcctgggcaatcatcacaccattatcaatacagaatctgtcatcagttgcgtgtacttgtccattggacctgtctttacacatttgggccatcatctcttgaagcctaacgttgcatccaacaccacccactattagcacttggtttgagtttacatgggccattgcacgttcggtaatctccacaagcatggcaaataaattttcctgtaaagagtaacataggtcttctacagtcacaagctgttctcctgttcttgaatcaaataataatttattcttcaagttctttttgaataggtctttcgctaaagtgtcaatatattgcaaaataccactcattgacagatccattcccttaacagtgtatggtaataccactaatttttctttattcttacactgtttagccagttgttcaatgttgtaaccaggcgatggtgcattcggtatcttcaaagttcttgcaaatctgtctaaacaattcccaatggcgatgtccaacgtttcaccaaagattcgatatcttttctcggagtaagcaataacttgagtgttacctccactaacatagagcacgacaggatttttagctcctgtgatctctctccccatctcgatatgccccacacagtggttaaccccaactaatggtatgtcccacatcaatgacaaagtccttgcagctataaccacacaatgcaaaggagcacccattccaggtcctctagtgaaacatatcacatcgatctttgtgggatcatcgatcttggcctccgttaatgcctttctaatgattcgtaccacccaattcctatgatgtcttgcagtatctcttggtaaaaacccttctcctggcggtgtcacatatgtatctctaatattagccaatatttcaacatcacactcatacgaaaggtcactatcttcatgtttttctagcactgggtgcttgataataccaacgcctaacttgttggcagatccttcaagaccaattgccaaataatagttccttttacctcttggtggaatgccgtttaaattcaccatctcttactgaaaaaagaatttttgacgataataggtataccttcaatgaatatcgcacgaacacacgttgaactggtgagacacactatatattcagggagttgtattacagatcaagatagtcaactcatctcagttcaacttttcggttttctcagattccaatttttcaaaaaatcatatacaccaattttgtgagtaaaagatagcatagtaagaggagcaacaacagaaaaagtgtatcaaactgcaagacatagtcatagctggtcaatcactcgttgaggggaaaagattgtgtacagaacgtattttcagattcgatatgaaaaaagatctccgcgacggggaattgaaccccgatctcgcacgcgacaagcgcgaattctaaccattaaactatcgcggattttgaaataaagcactcacggtgggggtcgaacccacaatcttctgattagaagtcagacgcgttgccattacgccacgcgagctatttaattcgttgagttgcttgaattccctttaatttatgtacggaagccgaaaccacgtgctaacaatgtgcatctttggataatttattaatggatttcaccctttgaatcaacgcaaaaataccttttattaattgcaaccagcggaaatctttttactacgacagtgaaactccctgagctaattttatctcattagcctctttatatttatcattaacaacagaatgttataaatacttcttcaatatatgaattaattgccattgggcaattaattgggggatagtataaactttcagcaatgtttgataaaagaccttctaaaatacgtacaccactgtgaggtatgaagcctcaatctagaggaaggagctgaacatgcaaatcagttagcaactgaggtcttcaagacttcattcgccgatcacatgacattcacagactctgtggacacctagaaaagttttctgccaaaattgcgagggcgtgtggtctagtggtatgattctcgctttgggttagtagcctagcgaagcttcgataaacgaagtttaactactgcaaagcatgcgagaggccctgggttcaattcccagctcgccccagattttttttaatttctgatcttttctaccactgattgcaacccagtggaaagtgtcaaatgagaatattttcgttcacaaaagcacgtgatcagctctgtggcttcttgtatatattaagctcttattaataactgtaactttcaacagtagagcaatgaatttattcttattacaaccttatcatctgttttatcttcactgaagtgtttcttacattattttacactggatgacatcggcatccgagtcactgaattatcgaatctctctgaatccgaaactgaagttgtgaggaaatagagttgataatgtcatcggcaatactattcgcttcaaaaaagtcgtttcctgcagctcacaatgctgtgcgaactaattggaccagatattcctcagcattgaacacgtctacaaatcctgcgatgcagtttccatgcctagataaactcgaaaagaaaactgcaaagcttagaggagatgactcagatcctaacacaccaagctccaagatgtcatgctctatggaagaggatgccacatccgcatcttcaaagaatgacccagtttacgggaaagtgagatcaggatttcagcttttcaaatctaaacaacctatatttctagactacggtggagtgctaccgaattttgagttggcatatgagacctggggcactttaaatgaagataaatctaatgctattttaatacatacaggacttagtgcatcgtcacatgcacattcctcatcgtcgaacgaaaaacctggctggtgggaagacttcatagggcctggaaattcaatcctagacactgataagtggttcattatctgtacaaatgtattaggagggtgctacggatctacaggcccttcgtctctagatcctggagacgggaaaccgtatgcaacgaggttcccaatgctctcaattcaggatatgatcagagctcagaagaggttaattgactgcttcggaattaccaaattgaaagcatcagttggaagttccatggggggaatgcaatctttggcttatggtcaactatttccagattcagtggaaaaaattgtttctgtctcagcatgcgcgaggtctcatccatcatctatagcaatgagacatgcacagagacaggtactaatggcagatcccaattggaaaagaggattttattatccaagtgaagagcatccggatagaatacctcctcatgtcggcatgaaattagcaagagaaatagcaactgtcacttatagatcaggcccagaatgggaatcaaggttcggaacagaaagattagatgatgacaggtctcctgttctatgtccagattttcttattgagacttacctggatcaccaaggggagaagttttccttagaatatgacgcaaactcattcttatacatttcaaagacgatggatttattcagcttatcaaagtccgaccaagagcgcagccagaaacgaagattgcaaagtcaaagagattttgaaagtggtgttttgccttcgtcaaggctgccggatgagccatacaagtataagaaaagacggagaacaacaacgatagaagaaagcagaaaagatctcgaagcggggatgactcaacttctagataaagatatcttggtgattggtgttaagacagactccctcttcccgtattggcaacaaagagagattgttgaacttttaaagggaccgaacgataatgtgacacatgttgaattagacgagaatgcgtcattgtacggacacgatactttccttctagatttagaaatagtcggatcgagcataggcaaattcctccgtgatcagctataaaccaaagattgtgcataaatttatatagacaactttttttaatttgatacgactgcattagcgttattccttactttgttttcataattatgaaatgtgaagtatgtatatatatacaagagtagcagattctgctacaaataataaacgaagatcattttgaagcgtatggaaatatatctatcgttttcgttttcggcattttcaattcctatagtattcttttaaaatctattgctcggaactgaacattttttccttacgagcagccttacgcttagcatcggcaaccttattcgaatccttaatcaaaataacatcaccgaagaatttataatcttgcatataacgtctatccatattgaattcagacatagctgcattatccgttagacccaacttttgaatggtccagaaatatctttcaggctgatctttcttcaaatatctcaagatactttgtctttgttgtaccaaaattctcaacgctctaatgttcttaaaatctttcttattctcctttacatgtttagccaagttatgaattctgacggtcatgacagcagcctgtacttcgctcgaacctgtatccccggggaatctttggaattcttctcttgccaatctgacagccatcttcaaggcatctgcgttactagcgttcttcatattgataatacgaagcacggcctcatgcttgttccttagatttttgatagactgttcctcaagcaaggaatctaaccctgtcaaactagcttgcttcttcttggtctcttcaacggataccaatagcttttccacttctccatgctcgtaccctggaatcaaaacgtttggttcttggagttctgccatcacacggtctataaatggtgtatttggacgtccaagcactggatccacatcgtccaatgagtttttgatcttattctgcttagcttcgttcagctgttttcttctttgagctttcaagaacttgactgatttagcacttccaatgacactcgaactggagaaaggtctcacaagtggcctcacaaatcctgtacgtaacataggcacaatagatgaactcattgcgatacgcacttgactcaatgatcacaccctcacacaacaaagttatagatatacgagctgaagaaatttccctcttctcatgatattcatatcagttgaattaaagtcaattctcaatgattttcatattatccaattttttttctttcagttttttttgtcaaatgcactgttctacgtttggtgaaaagactacaaaaaaaaaagaattggggtgcattaagggttcgaacggagaaaaatcgtttgaaacgaaaatatgcacatgagttttgtcacgtggttttatttctcacaagtgagagtttactctgttgacaagtgcaaaaacaagaaatgaaaagaacaagcgcaatcttctgtgaaaggatcggcttcagtaggatgttgctattgttatttaataccagtttcactgtagtgtcactgcagtttcacgactttcattgtcaaatattgaataaaactgatatgtaactccatacaccacatataattacgttttctttttccaggaatggcctgtacattcgaacagtgaaaattttccaaattagacctcatcgcatctcatctcatcaatatcgaaaacctttaacagactgatgtacaggcgataggttttgagtagtcaaaataatctgttctgttgttgattatttataacaggtagagttgaaacacttctgttttcttctgtgattgaaacaccctggaccaatagatatcttttttaactgttcttcgaaggttaagatacggattagagtaattgtactggtaaaagcagcgtaattttgacaagagatataattcacagatgagttttagaggtggtaatagaggttcccgtggtggattccgtggtaattcccgtggtggatttggtggtagagctgcaccacaaggtcctccagattcagttcttgaaatgggtgcttttttgcatccatgcgaaggagacattgtgtgtcgttccattaacactaagattccatacttcaacgctccaatctatttggaaaacaagacacaagttggtaaagttgatgaaattttaggtccattaaacgaagtgttcttcacagtgaaatgttccgatggtgtaaaggctgaaagtttcagcgaaggtgacaagttctacattgctcctgataagttactacctatagagagattcttgcctaagccaaaggttgctggcccaccaaaaccaaagagaaagagatctggtgccccaggtggtcgtggtggattcggtggtggccgtggtggtgcaagaggcggttctagaggtggattcggaggtggtcgtggtggctctcgtggtggattcggtggctctcgtggtggattcagcggtggtcgtggtggattcagcggtggctctcgtggtggttctagaggtggatccagaggtggattcggtggttctcgtggcggttcccgtggtgggttcggtggtggacgtagattctaagctatacacggaaattcatgcatattaatatcatattaaaactaaaaccaaattaagaacaacgaagttcaaaaataaagtcgcatagttctctcttttggttttatttcccgtcttttttagagcagttcgaaaaacttccactataaacaattgaattaacttcttttctatataacaatcttagatcaaatagatcagtatttcgcatgtataatattaaccaaatcagaaatcattccatcagaaacctattacttcataatataccacataatacactgtattgatagacctcgatgcgttctatgttttctactttatttctttatcttggaaggtcttaccccaggtaataatccacaagcttctaggacaacataccgtaaaacatctaatccgaaacgtttttgacagcgcttatttgtcattgagtttaagaaaatgaatctaggagatgtgggtaatcgcagaacattactttcttcaataatgctctctacttgcgccatgtctttgatggtatccatcttcgtgaatactatttcaaaaggaattccatcgttaacaagtaaatctatcatctgtgcatcgtattcgctaaatccattattggcacttattagcaagaaactgcgacgtaactctcttcttttatgcaaataatccatcgtgactttcccttgttccacagttcctttagtaccatatcctggagtatcaatgatgcgaaacttcccacctacattgaaacaattgatggtctttgtaaaacctgcctttttggaggcatttgcatattcgtttaaactatttcttgtcacctccgtagtgacactgtttaaaagagtagatttccctgaattacatcttcccaaaaacgctatttctggtagttggttgatcaactcgaatggaatcccgcccgtcttaccttgatacattttattagaattaatctgagggacatcctcagacgcaacaggtaacgtcatcgaacctttcttgaaagttgttgatgcaataaattcattttcttcatccattatagtttgtattgcttgctgccttttttccatcaagcgcctaaccttttcacctggtacatcattgaatgtaggagcactccattcgaacttaacctttgccttgttgaagaaaaaattgacttgtgataaatctgaagcttttagaggcgcatattccttattaagtttttgatataaatcatttataattgttttcaccttgtctgggtctcgcctctttgcgtgcctattctttctgatttcggtgttctgcctgtcatggttcactatttgttcctttgatgttaccttagtattcatcaccaaggatttaacatccaactgcgaaaaaagtctggtgcattgtttcatagttgtgtcgtcccacctacgtgatcaggcgttattgtatcttgaaagcatgtatggtgtccatatcattgttgttttattgatccagatttgatatactaactaactaaactgggtagaaaattttcttaagaaagagtgagatcaacagaagttaaagggtatctatctacaaaaaaaaatgaaataaaagaaagaaaggtatctaaagcagcccgaactttgtaacacaatattccacaatgtggctaattttcaagtatgtatatttagatagttttttcaattaaaagtttccagaaagtttactctaattattatcgaacaagccgccgagaacgtcaccttctaaattagggtcctcaagcatgttcgattccggtttatttttccctagtaattgctcaccagctctagctaggatagcttctcttctctctttagtttttgcttcatgatctgcggtgaagtgagagtcatcttggtcaccgtagatatctttcatccaatcgatgaaacccgcagccactactctctgatctttgtaattatctacttgctttaagtttgtgtaaagctcgtcaatgttgtatcctctggataactcgtataggaattgattgaagtaatcgtactccttcgaaagggttaagaaaataacggtaaaagcgtatagagcctcataaaacgaatccttgaaagctctttgagtcaatacattcatgatcaaatttggcacaacttcggtagtataaaatctatcaacatctgggtgttttgctaatgtttcggagagacagcttttcaaaatgaggatggaattgaatgaacatttgctgtctcgcactgagacgagcctattcaatagtcgcaaaaatggggcaagaatattgatgtcttcgaaaataatcttacgcatcttaatttgatgaaccgagactcgaatctttgaagcctgagtatgcgatcccacttgtccaattgaatctatcaataatcgaacaacaacagtggtgaactggcgtaacaagttctcttcaagaatttcttcggtcatttcttcttcatctctcggtggtggatttacttcactttgggtatgagttgaccatttcttttccaacattaaatctagtgttttgaatagttttggtaaaaatgctgacataaatttcggagcacattcatcagggcagtttctgagtatcggtctcacagctacgttgataatatgtttccaaccatgagttgaaacaccaggacttatgtctccgtccggcgtgtaaatggctattgagtccatcatcagattcgccaggttatctacctcaaagaaaattgatccaagtcccgacatagaagcaagaaccaaaaggacgtattctctagtgtacctaacaatgtgacccacagaatcagcaaaatcgcgcacagtttgtaaagccttattatgctcatcgataaattcgtctttggatttattcgtagcacctgcctcccagaatctttcaacagtagatacccgaacgaaggactgaacaacggttggcagtgaagcccagttggcagggttatgatacgattgaagctggaataggagtcttaagatatacggtaagataggcacaatacgtggcttccacaactcttgtaacatccggaactcaacatcgcccttgacgctctgcatggaataatggataaacattctagtagcacgaactggaaatatagtttgccaatgctgtgttaaatctgctttaagtttctttccgtcttcgtccatctgaatggacaataagtcactattttcgtcgatattacgtctctgaaaatactctgctattttcactattccaagtctttcaaggaaccatggaagatccgtcaaaccaacaactgtccccttatcagaccaagcagcaaactcaggatccactaactgggcaaatttttcccccttattctccaaattagatttaagaacaatagttaataagaatgacttgaaagagatcgtttcatgagagctcaactttggtagtatgcctgcaaccacattttcaagatcagggtatattggttgtagggatgctggcattaatagggccatccgattaagttcaataccgcaagcatacctcaaatcacgaactgcatctgattgttcgctcttctcgttcatatcaatctcagggtattcaagagtagcggtagtaataatcttttctaataacgtgaaaagcacgttgtccttcaaaatagttaagaataatgcaaagttttgaatttgtttcttcaagagtaatggctctctcaaatttaatgctaaaagttggttggataacatttccactttcgcaagaattgcgtcaagcttttgactgaaagttgattcgtctgtataccatatcttccatcgtatacaaccattaatgaaacattctacaatcataaattgagtcagagcactcaaatatggttccgacttgtgatccaaataagtagaactgagaacttgttgtccaaattgagatccaaagtatttattaagtctctcacataaccaatcatatgcaaagtctagttgaacacatgatatgaggcggataatatccctgattctctttctatagcttgaacagtagttctcgtattcagctgtcgactggaagtccacttcaacgaaattcttggagacatgatcttcaatctgttcgtagtaaatcaaagcatttccagcaaactccaacaagtcgggaataaccaatttctctaaaattggtaaaaattcatcgtttctcaagcatgcacaccagagatctaaggaaagcccgctgacaatcaaactgggattataagtagtttttaaaacaagcttcatatatgtttcgatgttttgtagatcagatattttgagcacgcatgtgtataaacaggttatcatatccacaaacttcttcataattggatatttggcctcatcgataccctcaattggatcgaaaagcaattgtgaatatacagtgtccattaaacccatactgtcaaatacacgattcacaatcatgttgtaatgatctgtgttactgtatggacgggtgaggagaatatggatagaatctagtgcaatagattgggctttgggtatgtcctttgttaagcaccctaacaatgcagagaatacgtcattggatacaataacttcgctcaaaggccagttcaagcagctctttaaagtttccaacaacctaacgatgtactgggcattttccacttctaatgctgcttttaattcactggtgaaaagagcaaaccaaccttctggattggatttgaacatctcccatttaccagagtacttgtatttcacactgaagacatccattgggcagacaatcattatgcagagcggttgaataatgggcaatctcttcaacacggcaacatcttcaagtaagaacgtgtcttcgaaaagcgttctaaagattatgagaactagctctctagacgcctcattcatctgccatagttctgttaggcatctatccatatcgacccacgattcggctagctgttcctcagtaggttcttccactttcaaagcctcaccccagatccttttcgctatttcgacccaaaggaaagctagcttctctctaatatatcttggatcattcggttgcaccctgtagtttagttcaatgatccactttcttaatgccatccgtttttcttcatcataacccgaccaatttttctttaaggcgtttaccaataaccctaatccaaaatgttttaatattgaattctgtgggttattgagagctatttcatatccccaaaacggcgattcttctctctctttcacttcgtccaaaaacttctgtgcatccaatctcttcgcattatctgattttggatcgtaaattacttccaaagctgcgaccacttgagaagcgcctgaattttccattgctctacttgtgcccagtcccttttcttgcttataaactaatataatttaagagaactcgtaattcttgaatcaaaagtgattcaaaatatcagaaaccgatgtggtaaattgagacagctatgatatcaagtgtgtttattctcccaattcgctttagttacaagacagaattggatcagatatttcctgttgttttcaaaatgagtccagaatcaacgttaagatgctgaaaacaaaagagaggtaatagcaacagtgtacaaaaaaaagagtaaagtggcttagtgtttttactgtcagtgtttactttcccagtgatcgatcgtgttaataattcctttccaataaaacaacaataacaaacagcctgaaaaaatactttttcttagattgcaatcgatcaaatataatgaccaagaatatgacaatcctaaagagcaattagtgtaccacctcttcagatcaacagagtaaccgtttgtttcaattaatcttttcaacagtgggcttgtactcatttaagcccaaaacattccaaatcctttaaaggtttcaatgccctgttttctttaaagccaaggaatttctcattttgccaccacttttcgtcagcctcgtgagtagtgatgataataccgtcaaatctttgataaatctccaagtgcaggactagtacacaggtggctttgaatttgtatataaatatatgcaaatatatcatagattgaacttcttcttttctttgtccattgaaggtttgtgttcccattctgtttcctctttgatacctctttgtagtcttttgagtttcatagtaaattggggcccaagttcttgaagacctactttctcttcgttcctgaaaacgtaacggtgtctgcggaagaagatgtaatctctttgattatgcagcgttatcacttgtctaccttcgaaatcagggttcttagggaaaatagattggaatagtttacccacagttttaccaagtctggtgttgaaattgttcaagattaactctggaatatggctagttggtctaccatggcccacgatcttttcgacttcgacgaaagaacttattttgaaataaaaggttggcccctctggaagatgaataaatgtaagccccgttactttcttcttatcttcatttattatcacgatatctgtatagttcctgttattacagaattcagagatttccttcagcttgtatccaaatttcctcttcacgaaagtcacattagggaaaacttcgatcaggatattagcgaactcatatgccttctttttggcgtttacattagttgttaatagaatctttggtggttcggtaccgttgaaaaatttcataaaatcatccatttcaccttcgacttcttgacccatcgtttcatcgtaaactctgaggttatcaattgtgtcaggaacattttcagcaagtcttttttccttcaattccggattctcacgttcttccttggctctggtcctcctcatagaatgacgctccttattgtgctgatccttcaactcagcaaagagtttttgcctcttctgcttgttttttattctgagttcatccactgccattttgaaattatagtatcgtccgatttgctgttatgcaccctcgctatttgacctagaataagctacataactagctatgttccactatattcaacttctatcttgttagcctcatctcatctcatctcatctcatctgatcaatacaaaaactttcaaaattttggaaagctaattttcgataaaaagaaaagagttcacattcgtcgctgcaatcattgtaggaagggtgagctgacgaatatcccatcaaaggatcttgattacctcaacgaccatccacaacagagatccatgctaaaattgaataattttcgtacttgcaatcgagttatattgggactttatatgcaatcgaagtttctttttttggtttccatagtaatatatggggaaaccagatatcaattcaggtctatatatacagaataaacaaaatattaaagcagaacgcaagcccacgataagaaatgaagtttaatagttaaaaaaaaacagaagtaaacgacgtaaaaattggccaaaaagcaaaaatccttaaacttgttcattggattgaggttcaaccttttccttttgaacattttcaattttcttgccatgatctgggtctctctcatcagccactctgttcttcttctttggaactctagccaaccagtataggaaaacacaaccgcaccagttgaacacaatgaagactatgaaaataccgaaatttctccatcttctatggtacgaagattggaaacttgtcaaaaatgcgtttgtttcagaaatcttacagaaattacaatcttccgtagcatttgaatctagtagataaccaccattcttgtcaatatagtccgccatgtactcaccacaggtttctccactccttggattaaagctgacgtattcatagtttgcgcatgttacagggttgtttgcaagaccagttgagagtacaccatcaataaagtaagttagcggtgaaatacggtacatgaaaatccagaaccctggcaaaacaccagaaccaccaaacacaccacagaaattcaaggacatagtgaacattaatgatgccatattacctgcagcctcagcatactgaagacctgcaatacacaattgacccattgaactgataaatacgtagaaggaaacagagaataaccagaataacacacctctttcgtttaattgaccggcatatgacgcattgttgtagaaaccaataggatagtagaaaacgaagaaggcaatggtaccaaaacatatgttaagtggaatttcaacggtgatttgagagaagataaatgccagccaagaaaatgttctacttggacgttccctagcttcgtacaagtctctttgagagacgaacaaaggcaagtattgttgacaagctggattaaagataactgtgaatgtgaagatagcgaataattgattctgcaaaccttgaatggataagttagccttgaaaaatgtgaaaccaataaacaactgcgagaagatggtcaagaaaagcttcgaccaaatgtacgatggagttctataatattgttcgaaaagacgtaatgtaacaaccttgtactgatagaatagagaagtaccaaattcgctttgttcagaagaagtatctaacggtttcttacgtagctcagattccatccaatctagttccttttgaacagcttgatattcatcagaatttctccacacttcatggtaatcctgagttgcatgagaacctggcgcagcaccaataacgtccaacatccattcagctgggttagcaccctcaggacattttgacgcaccatgtttttcaaagtagttaatcatttcttgacaaccttcacctaaattaccaaagtaaacagtcttaccacccttttgtaggaataaaagtatatcaaactcttgcatcaacaatgcggaaggttgatggattgtacacaaaatggcttgaccgtgatcagctaatttcctcattaattgacaaacggaccaagcagtttgagaatccaaaccagaagttggttcatccaagaataacaacaattttggtttggctgccaattctacaccgatagtcaatctctttctttgctcaacatttaaaccttcaccagcaacaccaacaacggcatctgcatactgttgcatttccaagatattaatcacgtcttcgacataattgttcttttcctcaattgatacgctcgaaggttgacgcaagtatgctgaaaatctcaaagattctctaacagtagaagttgacaagtgcaaatcttgttgttgacagtaaccgatggaccttgggaaagaattatcacgcaagtgcccattgacgaacatgtcacctgtaataacacccattgtcactcttgaagccaaacaatccaataaagtggttttaccagcacccgatgaacccatcaaggcagttagagtacccggcttgacccaaccatcaacattagataggatacgacgtgtttccttttttatttggacgtcataacaaacgttcctccaatggaagattgcttcagatttagagagaccaacattgacgcttttatcagaacttgaagaaatatttgattcaactaaggagtcttgtaacagtttttggtcggtgagagcaccttcagaatcttgaacagcctctacatcatgctttgccttaattaacttttgcttcttagcccttttcaaaacagattttgggaatagtaatatttcacctttttgaacagcactttcgttaaattcacagaatagtaaatagaacgccgtgaagaagatgaaataagcaagagcaatacccaatgcacgccatctgtgactagggttgtaaccataggcttcttcaatgaaagctctaccactaacataagaaagaccaggttgcgaagcgacggtattacagactctctcatataacccaatattttcataaccactgccagatgggatataagctgcacatgggaaatctctaccattaaattcgttgatcattagggattcaaagatataggatagaggattgatgtaccaaatccatcgagaccagcccaataaattcttctttgggatggagaatccaacatataatgagatggctaacaatagacatgatgctggtaccatcgcttctgacaacgtttttgtagcagaaccgacacacctgaagatagcggacatgactagggtagcaaggaaattcatcaaaaagtagaagaaaaatggaccagcttcccttctgaagttcaccatgaagtataaaatcaaattgaaacagatagcggttataattttggctggcaattcagaaagcatcgaagctaaggcatcagcagaaggatggtatagagaatatcttttgtgtttttcaataattggtctagcttcatacaatgagaagatttccaacatagaagagaaagaattgaaaagaaccgcaataaacatcgcagcaccacggtagaagaaagtgtttgttgttgtatctttcattgacttataaaagatcgaacctaacactaaggacatcgcagtgttaccaacgatagtacccacagtaataccataactttttttaattcgcaaaaagtttctcattgtcaaatatttcacttgcataccgtaattcacaatgtatggagattcctttctttgacgtttagattgtcttgcaatatgagcttcaataagctcttgacgagtttgagttgaatccttattcaattcttcttcaatctctccacgtagttgcttatattctggcgagtttctccaatattcttccatttgtttagctgtagatgggataaatctgccttctttgacgaattcttggttaacaattctttcggctggatttgtcacagcggtcaagaagtcagcggttgtttgccttgaaggagagacatatcccattctttcgaagtatgccttagcagcctttgcgttaccgtaaaaaatttggtaaccttcatgtaacacgcagactttgtcaaataaatcataagcatcctgtgaacattggtaaattgcgataacaccagtcgaacctgagatatctgtacttgttttcaatgcacgaataaactctaaagcagtggcagaatccaaaccacgagtagcattgtcccaacattggaacctggaaccacaaatggtaacttcagcgatcgaaacacgcttgcgttcaccacctgatacacctctgaccaattcgttaccaacttttgtatcccttgtgtgtgatagaccgtaagtagccattgcaacctgtgtcacgtgattggcaaattcttccctagtggcacctttgatacggttagaaggagtaactaagagcgcaatattgtacaaagtttcatatactgacaaatgagggaaatgcacatcactttctgcgttgtaaaccacttcaccacgaaaatgctttttgatagttcttggatccaacccattataagagataacggaattctcatcgacgttataaccatcaatgttagacgagatagttttcaacaaggttgtacaaccagaacctggacgacctagaacaactaacaaatcacctggttttaacaacccatccataggtttcaatatatcgaaaacgtcttctggtttacttttcacgaaatgtctctttacgctggaaaatatcttacctggcaagttcaacactgtgctttggtaagcaacgtctgtagagtcaccgaaagctctcaagtccttccaacaacaccctatcgtgtaatgcttgtaatattctggatcattattagccaaggcgaccatattcttgatccacgcagcagacgaaaattcatctgaatttgggtccaatctgacatcatatcctgaagcatctgaatcagtgaaaacaggattcacaccctcgtacctagtactgaaaatcgatttcgcaccatcatcatcagaagcaagtacgtttccagtcgattcttgttgagatgcttgttctttcagactgttgcgtgagagagttcgagccaaatctctgatttgctcctgaacctgatgatcaaacccctggtactcgaccagactggaggttgaatcagcatccatgattctcactatcgattattcctagttttttttttacctgtactctttatctgtctctatttcactttcctatttcaatgttctaagtaataaaaatgaatattaacaacaaacaatagtaatagaaaaaggcaaaaaaacaacgattcaaatatcaaacaaaatattacctggaaataacgatcttgttgttgtatgttatctgaaacagatataaacaaaaatctaagatatactaattcaccttcaaaaacaaacttgagatgagttccaaaaagtatacaccatgcaggtcggtatgtatatatatgaattacaattgaattcataaactataaataaaaactgtaaaatacgataaactaactataaactatatttacaatcatgcgaatgggctgcatattgattaagctactgccactccttatcaaaccgttaacaataccggaaggaaacatggtacgttccatggaaacagagcagatacttacccagttaaaacgacaaagaaactcgcattttttcctttatttccttcaaactattagattattaatacatattacagttgaatagatacttttttatgggggaggggcatctcattgtctatggactctcgtttctcaaggacacatacacactggaaacactggcgattggtctttttttgatgtctcagttctgcccgatttctgggggtaaagttttcataaaattgacatgtcgtagaaacacccgcaaaaatgaaactattgtcgttcagggaccaattgttatttgcacggattaatgaaaaaaaatttggttccgtggaacactttgtatgtgttatgcccatgagggtgctttttttttttttggtcgattggtgattcattcacggaacaggctgccccagccaaaacaattccacggaacagtattccgacatgtggtgaaaatgtcttttcgttacccggagaacagcaaacaggctgagacagagttttaatctccaacaaaagactgcagcgtaaatacgaacgggatctttgcttactgataggatagactccgtacagttatgatcaccattgtttatgccaaggggcatagcgtaattgtattgcctgtgatgctttatcaacggctgctttgtgtcttgtgcctttttttcgtggactcgaagactggaaatcttaaatcacgtgatagatgaaggaccagggaaataaactgtcgcgcgtcaccggacacaattaactcgaatggaaatatacattcgccagagcacagtattataccatgttcgatgcatctttgtacaatatttttaccaatatttcataacaagactattgtaatgtcttgctactagtagcaacatataacagacaaaggggaccttccctaattacaaaccaaattatctctctcattttttttgctggttctctcatcaaatccattgcttcgctatccatatagtcacctacgttggcctttcccatcgctgtttgacttgtttattctctctttttctttacatgtcttcattgcagtataacttagcaagtcctatcgagtttctaacacggtttttcgatcgaaagatcaacgattctgttgatattgtcgaagaaaccccggaagatgttcagaggagatacttgtttatggaatttatcagctcggagaccgagtatttagagatgttgaaactttttgaacacacgtatttggcaacactcaacaaatctgatcatatcgcatggcaaatgactttccgagtggtccaaaatctagttaagggacacgagaaattgctagaacaggttttcggttggctagagttgcccatttcaactgatgataataaagcagaaatcaattgggaactccatgcttcccatataggcaacaagttccagtctttgaattctttgtccaattttatccaagtatatgtcgaaaaattgcttctgttagaaccccattacaaggattacgtgtatcattattctctttgtaacacgttcaagaaacatggcatattcaacgcgaaattaattaaacaattgtaccaaatggaaccaatgttgaagaaatttcaacagcagcggctcaattctcaatgcactgatttgtttagaaggaatatttcattcgaatcactaagacacttaccaatcgcaaggttgggtcattataaggttttctttgactcgtttttgaagtccattgagtcgttaatcttgcaaacagacacaactatcggagaagataatgctatggatctcatgggaaaaggacagaaaggggaaacaaaatgtggttctgccgcattgaaaattctgtcagctttgaaagaggagtatgcagtaccaaagaattgggagttattaaaaatgtgcgtcatatcggtacaacacatgctcttaagagttgatggggtgaacttctccaacttgatagataaaccttcgcaacggatctccagtaagctcaaattcaagaaccccgacgaatacgtcccggtatcagcacttggtgttccgcaattaactggaattctaaacactgtgtggattgaagtaagtgaaggtcaaaaactatggaataatactgtcagatccattgatacttggagaaggaaaagagcattgtatccaattttccaactaaagggtaagcaacttggtgcttttctatataaatcgtatttggttttagcaaggattccaatgattccaatgactgaacttcaaactaatagtgcggctgacgttcattggactattaagtttgccataccgttaacgaattgtaagttgatcccgatcgataaagaacagaataagtacaatgaaattggattacatgaggatacagcttcaaaaatagaactgtttaaattggaatggttcctatacggtgatatattcgagaccatctttatatttgataattcatatgagtgcaagcagtggtctgatgcattgcaaacgataattgatttgaatggctttacttcaaaaccaatggaagctgactccgtagaaaattattaccagatgggtaactcaacctacgctccaattagaattgctccaaagttaacatttgcagatgcagtttcaaagactcttaatttaaatataacgagaagacagtacagcttaatcaaccatccagtacaacattattactattatacaagtttcaaattgaatatacggtttgatgcattaaaatcgggcccaactaatcaaaaaactggtattgccttctccagggataagtattctttcctcgagagacaagtctttgcattacagcacccgttcgattcattgcagtctccaagtaaggccatttcactttcagataactctgattccaaggccgaatcgtcgactaacactgatccttctctcgctctgaccatacaaacaacacagtcctatccctcatcctttaaatcatcgagatcttttgttttattgaagtccaaatgttcggatattaaatctttctttaaaggaagcaattgttgaaagcggttcaacaaaaaggaacaacgaactgcttatagatagatcatccttttataacataaacctagaataaagaaatatgcataaattcaatagactgttaagttcaaatttggaacctcaaaggtaaaaactggtcatttctgaaagaaattgatggtgtttattattatacgtgactatggacgatagagagaaatgacattgaaatatctctcgatatatgttaatatatattcgttaaactcatgaaatttcttggaaaaatccttcaaaggatgggaggataaacatgcagatcaattagtgggcgtaggatccatgattagcatcgttggtagaggtccaccttttcctgttgatgtttgtatttccgaatggcttaccatttttcaaaataacgtctaacaactcttccactgatttctttgggccgaattcgttttcaagttgtgacttggaggcttctccgagttcaccttcagaaccacgagcatcttgattagcaaagattttgaataatgaaactgtatctgttaacaggcctggacttgggtttttcacataatcctgtaccttttcttcagaggttacaaaaataacgaagtcggtttcttcacctttgtaaaagaatttgactggttcagacatgttgtttaaaatgagttgaagtttgtttcggtgtactgtatattcaaaataggctgcaatgtgttggggttaaactgattgcttgcttgtttgatggagtttataagtctattgtctcaaatctataatacaaagtaagaagctatacataggatccttgaatatgctcaagggaagctatttatatacgttttaggaaaatgaaccgtttaggaattaaagcttcgaacttgttctatcgtacgtttgacccaacacattttgctatagaaatgctttctgaccctttattcgttacgtaatggttaacgaaatccaaacatatgagctatggtaaaaaaaaagcaaaacttgtcagtaatgacaagacgtgatgtccaccaacgaggcgccgcaaacgtacattcaattggaaggattagcaagccttggacaccgaggaaaccaaggaaaacaaggaagtcactggaagcaattcaagaagttgaacattaaagaagcgggatcgcttcgaccaggtttccaccggcaacggatcaacttttttttttttttttttttttttagttcttcggtagtctgaggatgctgcctgcctgtctgctggcagaacttaccgcaaaggaacattatggacaaaagagcaccaggcggctagcagcccttcagtagatacgtaatttaccggcataagaacagagtggtccatagggtgaccactacaaggcctgcaaggtggtaaaaagtctattatattgtggtattttctatatatggatgagtctgaaaaaaaagtgatttgatgctaaaagttcttatgaatacactgagctaaacagagtgaatagatcatgaaatgtgttggtgcaatatagtacacaatcagtagtagaatccattggcaatgaatctgaccatgtattcttctacatggctggttccaccgtattcatcctcggaatcttcgttgttttcgttgtcgctatttccatcctgtgcggcaacacttccctcttggaaatcttcattatcgacattgacctccctcaatgcagattttgcggcctttgcgtcatcttcatcctctgcttgcgcgagtaacttgtttaggtttttctgatcttgaagtagtggtttatcgtcaggtatatcctctggggcttctgcaccaagtaagtccttcacagatagcttagtgaagtagtctgtggtgaaatcacctgtttggatgacaacgttgtccaagtgcctcttttggtttgccttcttcaaaatattactttcgatggtgtggtcgcttacgaatctgtaaatatggacatctcttgtttgaccaattctgtgacaacgatcttggcactgtttatccattgctggattccagtctgaatcatagaaaatgacggtatcagcacctgttagattaataccaagacctcctgatctacttgaaagaatgaaaacagtaattctgggatcgctgttaaacctttcagttaagatttgacgatcttcaattttggtagcaccatctaatcgcatgtatagataaccatgaaaattcaaaaattgttccaagatatctaggacttttgtcatttgagtaaatatcaaagccctgtgaccattgtcctttaagttttgtagtaattgtgccaatttctgtagtttaccacaatcgtattgtaaaagagatttatcagggaaagcaaccgataactttgtttgtaattggtggaatgggttttctagcgatctcatctgggagactaaatgatgcttcacagactcttcaaaccgcttgttattatcatccactcctactgccctctctctgatgtctaaggttacaactggaggagtgatcactgcaaacttttcgatggtttctttaccctccaacaatcttgtttctaatggttttatggattcctgtgtgagttcacaatcaatgaatttctttggaccaactgttagtagcttcacgatattagatccgtacattggtcttctgttacatctcaaattgttcatgtagttgagatgttccaattgacctattatctcattgatcttgttatgctttgcgtaggaataatattgatttagatcttgaaagtcaggctgtgttacaggtgaatcgttttcattgagttgtttcaatctacttatctctttcaaaatcggctgtacacattgaagttcactgatcttctcagagtggttggtgctcaaagttttatcattcgaagtgaactgaaagttcaagttggataagtctaccgaagtttcaaactgattttcatgtagacggttgtaaacgtagttattaaggtcgcaatacgactttgaaaccgaatcctcaatgcaaaatgaagtcaaaataggtctaacttcgaataaatctggatgattgcaaacttttcttagttgcatcaaacagttgataatggacataaagttaccactggcaagagtttccttggtctgagctcttgacataaaatcatcatataaaaatcgttgccttttagatagccgacagtagattatatgctcatattttcctggcatttgtttttcgacatccgctttcaacctacgaagtaagtatggccgtaaaacctggtgtaatttcgacactgtctttttagtctcttcatcttgttcgtagttttctcctgtttcgacaattttgtcaactggtctaccaaaccattgctgaaatgcatctaagtcagcaaaaccagaaactttaccattttcaagtgctgtttgtggcattaggaaatatagtagggaccaaagttcagctagattattttgtagtggagtaccagtaagtagaagcctcctttcagtattgaaattcaaaagggcttgccaacgagttgatctgaaatttttaatattatgggcttcgtcaaggatcatatattgccattttttacgcttgaatgaatgttgatcatgaactaccaactgataagaagtaatgcaaacatgaaacgcatcaggtttgttccatcctttacgcttttcccgtctctgctggggggaaccgtagtatgtcaaaactttaaagccaggagcaaacctcttgaattccatttcccagttcaaaagaacggaagttggcacaacaattaaatgaggaccccaattttctttctcacaggcgaggtacgctaaaagtgaaatagtttgaatagttttccctaaacccatctcatcagctaaaataccattggtcttattattgtacagcgatgctaaccaatttaaaccttgcttttgatatattcttagtgttccacgcaataaggaaggtactggaacgtccgatacagctaaagggtctgcagcagcgggtgaagtaacactttctgtagtttcagctttttcatcttttaattcattgtcagactttggtggagatggcaattcttccgtttttgaattattctcggcgcctgaactatcgccatcaagtccgtcatcagagctactatctgcatcaaagtttacatcagcctccacatcttcttcgttctcatcaatattaccaagaagagcagataatcctggggtatcctcttgcgcagaagcatcagcatcctccgtttcactttcggacgagctcaacgaatcttccatagaatctgaaacagaatcagatgcttcatcaaaaattgattcgtctgcagcactcttactagtttcattgccaaaatcattgattttattcaattgtgcgtatttggaccgtaattcttctacagaaagttccatatcatttccaatcctttccgtattaccttctttatcagagtcgcaggacgatgtactcatcatttcatcatctatatcagaattgccatcagattcttcattggcggaaaattcagagcttgcatcagatgcttctgaaggatatgtacaagaatccaattggtttaactgagcaccgagaagctgtgtactctgctccaacatctctgtcaaatgttgctttccttgaatcctttctagttgatcaagttcatcctttttcaagactttgtatgctttttcagccattgtccatcttttcttgacggcttgcattgcaaaccgggctagattttttttgcgcttttcttcttctttcagtttacgttcttctgcaccagcgatgtgtttgaaatgagattcgattatctgtgccactctacgtgccttagcgatctgtgaacgtcttgaatcttggaaagatttacttaatacaattccttggttaacaagatgatcttggaaagtatgcttactttgttctttataatatacggatatgggttcagcggcgtttgatggaggcataacatctctgagagacaaagattgcaacgaatctgtttgtggatcatatttaatcgctcccctttcgaaccctatccgtatgagtttggcagtcttccgttgttcctttatgtatgaatcgtattcctccagactaacatcttcatcaagagatttatatgattgcaaaaaggaatgcacgtcagcgtactctggtttaagaacatgcagaggattggtaatggtttggcgaggtgcatttacatgtaatttaactttcaatctatttggtaggcttttcttctggagtgcagtacgtggtttttcattatcgtcatcttctgacgaactagtaaagtaatactcttcatcatcaataatgtccccagtagtgttaagagaagttttaagtccactttcattattgtttataatatttttgcttttgttattggtttttctattatcattgccatcgtcattagtgtgcgtagggtctgctttcgtccttttagattcatttttaatctctggtgactgttttctcacaagttccgtttgtgatttcacagctcttttttttgatttagccttcgatgactttaatctagccttcgatttaccttgtcctgtattggttatatctttgacaggtgggtcttccgattcaacagatatatcattagtactcgagtctcttttattcagttttgatttcttgtctgcagtctgtttcaatgattttttgggagaagataccacaggagtgtttaacttattctgtgcagagccctgagcagtaaccaccgtttgtcttttcttgttgggtctcggtaccgctacatcctcctcactttccgccgggactgatgccacttgttgtgttctcttcctgcctctacggccacatacagacgcccttaacttttcctgcaactcactgtactcttgatctaccaacggcatgacctggccccatatgttattcttatctgatgacgagtctgctgttccagaaatgacatttcttcttttcaatcgtcttgatgcattactctctttcatatcatcttgctctaggctggactcaacatcaagacccctttcctgtaaaaaagttttaaaactgttactcgtgttgcggaacaacggatcgtattctaccaacgacgtaaactcccatagatgaaacaattcattcgtcaatagttcgtattccaatcgcgtcttcgctaactgacgccaatccctaacttctggcatcttgaaacaaacaaccgcagtaaatttgtatactgctggaaactagaaagttaacgctatccagtgatgtagtttccaggtacttcgcgcctcctaattgtgcgaaatatccgtgaatcgtggtgaagtgtgctattactgctgttattttccttaaggcgtggcaaaagtgttttttcccgtaaattcatttttttcattcttagatgaatataattgacagaaaagtgctaaggatccaatggaaaagccttcaagattaggttccgggtaacagtattcaatgttccatacttaaccgtaaactgcactgttgtaccggaacgagattacagacacccaattgccagccatctaggtcaactgcagcggtgcattgacttacactttctccatattcatgatgatatctatatttatatatctatatttatacgctcgtaggcaccacgctactgatcatgtgattacaaaaaggccaaatgcaacaaataagtaagctcagcttgctctaaattgtggttgaaaactattaccaaccactatacataggctagtagtgccttcagccaatctcccaaacaaattacaaaccaagtttcgagggcgatgtgtgcatgtgtgcatgtgtgtgttcttgtatgtgtatgtgtatgtgtatgtgtctgtgtatgtgtatgcgtgtgcgtatgtgttttgtcttttacatgtatggaatgagtttctttttgtctcagcatcagaacatggaaaagaataatcgaatagaaaaaatattactggaaaaagtcaaaatttcattaaaaggtaagggaatgggagttctacttgaaaggatgttgttcgatatcaataaaacgatttcgttactcttcttctctggtcaagttactcatcattacatgaacttgaaccactgcggacagatctttaagaaagggacttcggtaggtgatctaatttttttttttgaagaaactcttccaactttaggaaccaccttaatttgaactctggtttatcatagtgaagtaaactactttggacttactaataatcgctaaaatctcataacttaattggctctcatccgaatagagaccagtacaaccttgagaagagttttccccctttttctctagttttttaatacccaaaatcaaatgtctaagcaattcaagcatacaacccaggagagaagatcttccataatttactcgaacaataatggtaaaggcggtcttttctctcctcaagattatatttcgggagacaagactcaagcatttatagacgacgatattagcgaagattcagaggattctcttttcgcaaccaataattctcgtactttacaacacgaatatggttctacaggccgaacgggaagcagtgatagtagtgagattcattccgccttaccgaaaaatctaatacgagaagaacgggatctattgatggacaataagctgtacaattctaatcatgctcttcataatcatgctgcatattcaacaaatgatccaaactcttcctttgcaccaacatcatcaatcgaggatcaagaagtgattgaaacttgggaggatgcaattgaatcagggaaagacataaataccacatttaagagagaggccatagtgataacatctaatgcatcacctcttgtactgactttcattttacaaaactctttatctttagcatcaattttttccgtttcacatttgggaagcaatgaattaggagctgttaccctaggatctatgacagcgagtatcactgggtttgctgccatccaagggctctgtacttgtttagacacactttgtgcccaagcttacggtggtaaccactatcacttagttggtgtgttgtttcaaagatgtgcaattatcacgatcattctttctctacctgttctcttcacatggtggcaatggtctgaacagatacttgcattattcattccagaaagagaactatgtgccttagctgcaaaatatcttcaaattgtttctctggggattccagcctttatcctatttgaatgtggtaaaagattcttacagtgtcaaggaatcttccacgcttccagtattgtccttctcgtttgtgctccccttaatgcattgatgaactatgttttagtgtgggataaaaatattggaataggatatcttggtgcacctattagtgtagtattgaattattggttaatggctcttgggttgtttgcttacactttatacacgaaaaatgaaaaaaatcccatgaaatgttggaatggatttatcaaaccgcatcaaattttgaagaattcacgaaagatgttcaacttagcactgcctggtattatcatggttgaagctgagtttttgggttttgaaattttgactattttcgcatctcatttaggtacccatgaattagccgctcaatcaattatttcgactatcgcttctcttgcctatcaagtccccttttcaatttcaatttcgacatcgactagagttgcaaacttcattggtgcgtccttgtatcgaagctgcgtaattacttgcaaagtgtcattattactatcgtttattattagttcgttgaatatggcaatgatttacaaagctagatacctaatagcaaggcttttttcctcagaacccgatgttgtcagattggtttctagttcgttaccaatcttggccttcatgcaaatttttgatgcatttaatgcttcaactgcaggttgtttgagaggccaaggccaacaaaagataggaggatacatcaacgtttttgcattttactgcataggtatcccagtatcatatttgctaacatttcattacggatttggtgttagtggattatggtggggtatcacttctggtttagttttcatgagcattttccaaagctatgctgtatttcattgtaattggaatgatattatccgtgcagcaaagtctagaaatagcgaaggtgccatggtataacgtctctgaaaagaccacatatcgactaaataccatcgtacattaataaattaggaagaaggtaaaccccattcaatgcatcttatattgaacttttcatatatcattatctgtttatttttttgttgtttagatataaaagatttaacagtacatcttctagttgaaggattgagttgtcagctgtttgctaatcattttattgtacaataccatactgttccaaaattttggctaaattattatataaccatggtatggttttatcattttcctcaacaataccttggaagtgttcgatggattgctcaacggttatatttttgccctttgcatatttgttgatagcattcaccaatgcgctgcggcgctgataagttctcaacttgggtaatttagacaattgacctgcaccatgtttctcctcgaaatgcaagatctgaagctttgtatctgtataaaactcgtggtaaaggtcatggacgcttttgggacaatctgtcattataaggtgatagttctcaacattgttcagatcttttgcgccgagaggtctgattttgctcgagtgttgtgatttcgctaccttgtaccttgatggcatttctcgcgatgcgttctccgcttctctgctgagactactgaaaagaatttcatttttaaattcttctttgaaaacttttggcccttccgaaatgtcagcttcagtctcatcaattccaagtagaggtagaggatcttcattctctttatttacgtcaaaatccacttcttgttcctcggttaaaaactggttattcatatccaaatcatgagctaaaagatgtgttttaatgattcctaaatcaacaataatcccagtatgctgttgttgtattaaatctaacttagattttaacagggcaatttgaccattgacactttgacacttgctattacacactgcgtcgcataaaacgttccaatcagtttgtaaagtgtctactctgctttggaatgtatgaattattcgttcaatattctgtggcatctcatttgattctcggcgtcttcgcaatgcaatcaaaacttgaaaatactaattgattcagatgtaaataatagtgtatatactaaactacgaataagcacgaataacagaggtgatgatgtgaaagtttgtgaaatctgtggtttatataatatttgacatatgtttaatatagtaattaaatctttttgtgacacttttatttttcgtttttccttttccttcactgactgcatggacgcaccagtccacacagaaaaaccagcaaacctaaatgtggcacatcagaaaagttgttcgagcggcgatgggtttgcaccatccaaacaatactaggaataacgttttcctgctggttcgaaaacgcactgaatttaactactgttattcttttatgaattgcaaagtatcgatgctatctggaaaatttgagtacagattaaatacattttgtagggaaaactatcattgtaggagcggtgacagccgttaaatctatgctaaatgggtaagttttaagacgatatttgtgaaggatagaaattaagaaagaggaatgaaaaaaaacgcgatactcctgtacctctaattttttacgtttttattctttgtcttttgtcttttagcgctggatttttgttctttcgtttgctctttcttttgttcttcttgctcttcttctgcctcgacctcttccaagtttcttttggcttgcttaatttgcgtagcaaacaaggagtctagttcgtctggatttgcaatttctaacaaagatttctcaaattgtgatagttgcaattcgacaccatcaatttctatgacattttgaacggaagtcttagcatcatgtctggacccaaccaatttgtctaatacttccaaattaacgtataatggaaggactggtgattcgttagatttgagaagaatggttctgatattgtacttttcgatgaactgtttagcgacagaaatgatattttcagtcaattgttctggggtgaaccattccaatgaacctagatgaacattcatcgtgttacctcttggaagtttgactgggattttagtatcataaattctcttgatgctatttaccaaagttgtcttgttaaacttgttatccgatcttgtgttaatggcaattggagtggtattcaacttactgtatgctttaccacctaatagcttgggcaaagctgtcactatcgagtcatcagctagaatgaaagaaaaatcctgtacaaatgcacgcctcttttcaaaagccttgtattttgtcttcaaatctttaccagatatgatggcatcaatagtaatatgttctggaagtagatcgatcaagtcttctgatgtcactgaattgatatcagaatcttttagaatcaaaagagtcttgaaatctttaaccatggtggtgctagcttccttccatggcttgaagatagaatgaggaactgtaattagttttggtttgaagtttttcaaagaaccagtaaaagattcagtgttgactaggatcaactgtagctgagcctccaattcagaatcatcaattaactgattgtcatttgatccattttccttcaaatattcttgcaatttaataacagcattgttaactctgttaactggaatgacttcttcctctttactgcccttagtagccttggtggctttggtcgaaaccttgcttttcttagttttagttgccatattatctaaactttgatattgcttataatgtgcttgtagatatactagactggatgagtggagttatttcctctatattctggattctttccaagcgttttttaacttacttgattcgcactgtctcagaaaaagatcaacaaattgttggttcacctaggtaagcttacttctcgagttcgtactggcaactatgaaatatccagtatatatctaatcaatcctttgagctgagaaataagaataggtacttaaatactttacataccattactttattaatcgtgttaggtgtgcaacatacttcgagatgagatgagatgagctatgatgagatgagctctctattgtcaaaaataaaaattttctgtttcgcaggagctccactgtgttcacgtagttagtaaatattgctttttgaaagcgaaggccgtaatatatgatttgaaacttttcttgaaatttgataacatttgacacttaagaaataaagagtaaccgaatctgatattgaatctcggtgcgtgtttgtgcaaaagttactaatgagcaacgggctacgttcagtgaatggggttacaatacaaaagggcttaaactgtgtattttagggtttctttctctggtttatttcggaacagtactatttttgagttaggttttttcggctgtcaaacaggactcacgatcgatataaaggataccttaacagagaatacgccgcacgaatctgatttatgagttattaagttgctattattattattattattattatatcgtaaacatagtcatcgtccccgttcatttatactgcaaaaggcatattagcatatattaatcaaatctagccgcaggggtaagcatacgctctcacaagacaaataagaagagcattagacatgggtaagagaaagaagtcatccagaggtccagccaagaagatagtacagaggttagatacggcattcaattgtctcttctgtaatcacgaacgctctgtgagcgtaacaatggacaaaaagaataacattggctcgcttcattgtaagatttgtggacaatcgttccaaacccgcattaatggtctatcacaaccggtagatgtatatagtgactggtttgatgcggttgaggaagttaacgaagggaaacatagcgaatctgaagatgaaaacagtgacagtgactacgagagtgactctgatactgagccttcttcaaaccgtagaaaagctgttggaatagattctgacgaagaagaagaagaagaacaagaagaagacgaagatgcggattacggaagaaaaggagcgaccgaacgaaaagactcagaaccagaatcagactcagacgatgacggtaaaatatctaacaaaagaggaagagcagcatggatggacagtgatgacgagtagtcgaaccgacagaaacacagacatcgaacaccaatattaatcttacaattgtatctatctatctatatattacccagagatatactagtagaacgaataaaatcaggtataaaggagctgatatttacgttcaaagagattgctggatcttatctgtttcctataagaatttatataacgctcaccttggctttaaccatcggttgatagtattcagtttgtactgcagaagaatttatatatcaattctacatcaataatagtatctttggtatatcgaacttctcagtaatgtggcattatttctgaactagatggtgatacacgagataacaaaactcgaaaacttcagttgtatgaattcaaacaagataaaattacttctgctcgtaacggtgcaataacctaacatacgatcaagtgaaaacaaaagagcacatttttctgtctaccgctaaatagactaaacgcgtatgttaatagctgtttgtttgatatataactacttttccttataatttagtcagtataacatatatataattataataattgtgatgatgatgataataataataataataataatcttgattttatttgaattgtttgtaaatgtttcttgaaggtttgtattcacggttctgtatatgtcctggcaaataaataatgtcttcgtatctgctactaccagtagtcagcaccaaaaaaacctcctcaaacaaacaaatgtgtgacaagaatatatggtgtcataggatgggacacgttcgtaaatatagtttttgatgatatttattttggtttcatttggttgttggtgttgtggataagtattgttctttccttcctagtgaaaggttctcaaaaagtgaaaatagtatgggagaagatgataaagccggtgactttagattaaatgttcttctatatgcacttattggaacaattcctccttcaaaggaattcccaattcttctctaacatccttcaattcatccaagtaagccttgtattgatcttcgttttcaactttgtatctcaaggcttcgaacactctgacagcagttggcaagtcgttaacctttctggcggctctcaaggccttttcgataacagctggggctggaaccaaatcgtaagagaaacagttattcaacactctttggacttcgaataaatcgtaagcctcttcgaattccttttcgtatctggcggtgaattcttcaaaggtttcttcttcgtgtgcatcggagtactttctgatagaaacaaattgagattgtaattgaccaactcttggggcaacagcagctctcatcataaccggagcaacggctcttactggcatagcagctctcaacaaagttctggacaacatatttttctttgtattggttgattcgggatttggatttgattcactgtattaagatgatcaaatagctattctaaaaggaattataacaaaccgtattcacaaaagattcaaagtcgagttctattgtaattaaaacttaatgtaaaacgctttaaagatatatcaaataggttaggtaaaaggtaaatcgaccgataattttctctggagtttttttaaaaatttgaagtaatgaagaatgaaaaaaaaaaaattaaatacttaaaatcgcataggacaaatatcaacaaacagttcaaatacttaaactagtggatagctacgtctttgaactagataaaaacgagattgttaaaaggaaagtaagagtaataacttgcgaaacgaatagcacaaatttgaacctcgagtgagtcgttccattcgaaacaacttttattgtatcttattctttgtatgcatcatcttcttagtagtttacaaaaaagtggtattatcagttttttaaatagtgtgtctatggaaaatggatggaagaaaaaaagagggctaacataattcatcggcagagttgcaacaaaagttcacactccaaaaaatcctacatgtggtacttacgagcaagtcgtttatctagttcgattttaattatttgaattgagtatttcttgactttctgctgcctgtcatttttcagtcgagcgatgtcagattaaagatctcatgttcaaaggaaatgaaaccttaactctcataatcttcgaaataatgtcctataaaacaagataataagtccgtgataataaaccccacaagcagtatctatagaatccaataaaacacattcgtgaaatatgctggggggtaatgggcattgattgagactggtccgaccgttctgtagggtgtcttgtttgtggggaaggagaacgtattggcatatgattggttcgtcaccgatgatttttaccacatagtcgggtaataggacagcgggagaacgtgacttcaatacaaatacaattacccggaagtcgcgtggtttcaaaggttttttttttctcggtaggcaggttcccctgttcgatccctcatctccgcagaaaactgcgggttattatgtctctaaacgcgatagttaatcctctatatcgtcaaacgttgagataggtggcatcgcggtcttgatatgttgcatcaaagccgtatggtttggttcagagtttgtagacccctcaactattattcgggtatgtccattgtcaaacacttttcgaacagcaggttttgaatcatcgtcgatacctgcaccagcctcttcatgtcccgtgttacgattaggccattcttcaagcctagagtaatcaaatcccggaggaggtgacgctggcggagacactagaaataatgtctgggcagggggaactttaaggtgattcatcacagtgtcagcgccagcgtgtggaaatccagcttgtgaattcgattcagccacgtgattcgtgatggagaacccaaatttacaatcagggaataatgggttcaaggatttcacttcacggctcgcctcaatattaggcgatgttaccaatattctcttgaatccaggaagtgtaatgacacgcacggcatccgcaccgtaaatctgtcgagtatccaccacacattcttgcaccttatttacgatctcatcaaacaagggcttggagcacacgtcctttgtctttgacgttattattacagtatcagtagcaaaatcatcatacgttgccattccaaagaagtgtattcagtgtgagtgtaaccaaagttcgccgctatttgtgcatgtctaagtaaacacttagtatatgtaagtagtagattacgtagttactgaagaaagtgaatcgatctttacagtgaaatattgaaaaaaatattgaaacagaaaatcactaatgcatgagatgaggtgtgttcagaataacattacgtgtaattaagttacgcttgattcagtttgagatttatacgttagaattaattaaagagacagaagaatatacagaatgcctctcactaacgttatatactgtggtgtgtgtgactttcctgctgaatactgtgaattttccggtaaattcaaacgttgtaaagcttggttacaagaaaaccacccagaattgtacaccaaatggtatggcgatgtcactgaagatgtgtctaaacaattggcagaatcatctattggtgatgaaagagaggagaagcttgaaaaggccctagagaaactagaaagaaaacaacaggctagagaggaaagagaattggctaagaaattatcgtctaaagttgtgatcagaagagaagcaagaacaaaacggaagtgtatgattgctatctctggactagaagttttcgaaattgacatgaagaaactttccaaaacttttgcatccaaatttgctacaggttgttctatctccaaaaatgccgagaagaaagaagaagtgattgttcaaggtgatttggcagatgaagtagaagcatatatacattctttactagaggaaaaaggtatgaaagaagttaaggtagaagtaatcgatgccgcgaagaagaagaaaaaagctgaaactacaactacaccaggatccgaaaataagaaatgattatgagaagcacatttagctgacacccttttgtcataactttatgttagcctcttaggtagaaagatttatataataccgcattcatcgttcaacaaactgcacaattaaacatcagtaagatgctatatctataccctcatatataataactgtagtagctattaggttcccataaatatactcccatggtgaggaagggcaataccttacaaaagaatatccgggtaagatcactttttcttcacttccacttccattatgcaccgttagatggtgaggaaacatgtcaaaatgtaaaataaactaaaagctattttcaccgagcacagagagtaaacaagagaaagagccttgagtaatacactgagcactcttgtatttgcttaccaattggttgaatcacggaagcattcggaagtcaattgtactatgaccagaggatacattgatgattcggtgaatcatgctttagattctcgactaattggttcaagcgtttttcaatcgtcagatgctttgctggatcaattattatctcttcattatagagcccattatcacataaacatttctacaaagacaaaattcagtgcactgtcggcccttttatctgaagtggagaagttgcccgttctaaaggatgaattacactgtgcaattgcggacaatatctatggtattgttttctgtgaacttgatgaaaaggaaaaggggttgcagtacgtctctaagaagttaggcagcgttaatggatacgatagatttggaagaatgctagatttggaaaggctattttataagggaaatgtcgacttagctgagttttcctctgaaagctggactattccgaaatattctgatggcttaacttggcattatttgcaggcaataataaaagggctggacctctctcattttaagccaaaaacaccattccaatggatgcttttgacccttaatggttctgcaactgactcaaatcttctatcttatagccattcattattgaagaaaagtcgtttccctaatgctgatgaatcaaataattttgaactagaacaattccacatggtcctacaagagcatctcaaaataaataatttaaatgtgaagaaagaatgggagcaatttatcattgatagtatggaaaaaagtttccaaagtatttcggttgcaaaatcagcaatgctcttttatcgaaaggtcgatctaaagaggagcattctaaactttaccaatttggtcaattattcaaacaaatattacgaacttaacaaaaggtatcctgacttattagacttagtttcatcgtaccaattcattctgtctacatgtaaaacgccatttgaaccgttcttcatgccagcaaacgtatcatccgatttcttaaagttgctagaaagaattcacaacaagtacagtatccctattatagaaaaacaaaaggcactagaaggcagctcagatgtattggacttatgtctagcctcatcaacagcttctgttctatccagttcatgggaaacgttatacgaaactagcgcttcttctctcccagccttggtagatcacagtcagatattttacctatcgaattctttgcaaacgtctttgaacgcttctgtgtcattaaagtttaagttcgcttatcatttggctacattaagacaaattgaccaatgcatcgcttatctaaaaaaacaaatattaacacttcatccagaacatttcgctagttggcatcttcttgcgttatgtgaatcctgcatcaatgaagatttacaagtaagtttcaaaattatcaattctgtcattcaatcaatgtgtgaacttttcgatgaaggcaggcaattcacaattgatgaaaaatggcagtttattcacattaaattaactcaacttcaactagttagagacatgtttgcacttgaagatgcacttgaaattttgccagaggtattcgaactttatcagcgtctcttttcagatgcttcagaaccccttggtcctcaaatcaatcagagtaacgactatctattgcagaagatttggttgtttgcattggaattatacctggaaaatgacgatatcgaaaatgtaaaggctgcgttagatgagtttaagaacgtaacttcaaaatatgttaatttgaaccacaacctcgcacaaggattcgtgttgtatacacatggtcactctgaaaaagcgacagcggaattcgaaaaagttttgcactatgactctacatctgtcgaggcattgatcggtttggcaaaaatcgtgcttcctgatgaagaggcaaacctggatacggatctcaagcataactccaaaataaaccaaaaggagctacatagaaattctgccacgtcactcgaaacttcttctgctgtagccagacttaagttcttattcgaagaactagtcgataaatcgatagaaggttatcaaacatctgcagtgtggtggtatctatcaaaaatatacgaaatatattctgattctaccagacaacaggaggcgctatggcgatgcatcaagtacgaagaacttcaacccgttcgcgaattcaagttctgtaatttctgatattctttcaatttacctcatccaagtgttctgatatccataatatttccactgtggcagctgaagtataacatattacattctagtatatagatttatattgtgactatagaatatactgagttgaattatgtatgacacgctaaattttacccaagcttgtctagtcacctgacttatcgagaaggctaatttcgttttcgatgttgatatatctacggatggaccgtgtccaagatctcgggaaagaagcagaaatgatacctgggcatcctttaatgaattggaaagcgcaataggttaccctttatacaggaagggcaagtggttcgtccaagggtaataatggtttctaaatcatctggatttttaccgaactcttcagacttgcgattgagagaaagaaaagcacaattcgatggtacagaggttttagaggacttcttaagagataatgaacctgtagaggataagctggtgaagccattgaaatcttcaatattttccaacagaaaccaccgatttcacacatatgtttgcttattactaacactggtatctttcgtgcttcggttctacaagattgacagaagcaacatcgttgtctgggacgaggctcattttgggaaatttggatcatattatttaaagcatgagttctaccatgatgtgcatccaccattgggcaagatgttgataggtttaggtgaatacctcgcgggatttgatggtaactttgactttagttccaactctagttatcccgatgaggtaaatttcaagattatgaggcaattcaatgctatatttagctcactgtgcacacccttagcattctatgcagccaggaatcttaattttagtatgccaaccgtttatctcgtagccttaatggtttgtttcgaacactcatatattgttttgggtaaattcgtgctattggattccatgttactgttctttactgttcttaccttctattgtttatcgcagctttataggttaagagagtgtcaacttactgtgaaatggctggcttggattctggccactggtttctccattggatgcgtatgttcagtcaagtgggttggtcttctaatcacagctctagtgggcatttacacggtgtcagaattatactgtctacattgcgatagatcattatccaagactaaataccttgggcattggatagtgagaatttcggccttaatcgtctttcctttgattctttacatggttttcttcaaaattcattttactctgctttataaaactggcactggagattcatctacgcatagtctgttccaagctaatcttgaaggagctcaaataaagccgagccctagagatatagcatttggatcgtgtatctctctaagatctcatggtttaagtcctgggttattacattcacatccacaaacttatcctgatggatccaatcaaagacaggtgacgggttacagctatcgtgatggaaataacaattggattgtcaaatattctagatcgtcgggaaaggcgagcgcagaagaaagggtttacagcgataacattttattccttaaagatggtgacttattgcgattggttcatgaaaaaaccaaaaacaatttgcacacgcatcagatcccttctcatgtttctaaagggcattatgaagtatcaggctatggtaatgatgctgtaggcgatcttaaggacgactggattattgaggttgtcgaacagttaccaactggaaataacacaatggaaaataaagccctgattcatcccctcaccactagttttagattgagaaacaaggagctcggctgttacttggcagccactggtctatcatatcctggttggggttacaatcaagcagaaatcgtttgcaaatatccatggaaccagcgtgacaaatccacctggtggaatgtcgaggatcacataaattctaatctgcacattgaccaaactttcactccacctccaacaaagttttggaccgactttgtggttataaactttgctatggcagcatcaaataatgccttgataccagatctggataaatacgacagaattgcaagtgaaccatgggaatggcctattctctacaaagggttacgtatgtgcaattggaatgataaaaccgtgaagtattaccttctcggttcacctttcaatacttggctgtctacggctgctttgcctatattgttaatcttagtctctatggaactctttaggtatcaacgccaatcactccagttaaacgaaaaaaaagcatggaatttatttgcttgtgcaggattatcattcattggttggctacttcattacgctccattttttatcatgggaagagtaacatacatacatcattatgtccctgccttgtttttcgcaattatgactttcgcctatgttgtcgacttcgcactggctaattcgaacaggtacctaaaagtagttgcatattcgtctctgtacgcggggtgtacctttacttattggtattttgctccattctgtcagggtatgccggagccaaatttaacatatgttaatcttgaattacttcctagttgggatgtaacgaacgcgcagtacaattaatctatttaaaatacttatgcggtactatttagatacttatacactaatctttgaatgtgcttatatttaacgaataaatgcgtgtagatgtgtcagcgcttccgacaccaagtaaaagttttccgttttcgactaagttactccatcttaatcgattgatcttatcagcaggtgtaatagcccaatcaatttcggtaatgtcattaaagctttctgtatacgaaagaattcgaatggcaccgctttcaaaacctacggcaagcaaaaccttttcgttatataaatctttgtgaacggagatggaggttacaggttctgaaaaccgtatgctattctccaattctacagacgtagcttcgtcttcttttgataatctccaaaacttcaacgttttgtcacgggatgcagtaataaatgccaatcctttggccaatggtacccaatcagcatcccaaataattctactatgtggtttttctttgaagcttctgagaacaaagctgttattatcaaagtttctttcccacaaggaccacagtctatctctactaacactcaagagataacgattatcctttgagaatcgtaactttgtgattgtcaaattatggaaaggaagaacctgaggcaattgattccaattctcggcatcaaataatctaattaccgcatgctgagcgttgttagatttacaggccgttgcgattaatttcctatctggcgaaacatcaatacaggaaatctcatatccatgtccatatagcttttcaatttcaggccataaagtgtgtctctgtaactgatcttctaaaggcggagttaaaagttcatcaatcaattcagaagatatgtttttggtttctgcggtttctctggcatctggatcatcatccgattcgttctcatcaacatcggtagtcgctttgttagaaagacctaatgctggtaatgctgcagaatctggaaggtcaccgttatgttcagtcttaatcccgctgaatttttgcagtagctgagcgacggcttttggttcgtcaaaggatcttagaattttttcatctcctccactaacgaatctcgtattagaaatgggttcaacacaaagcatgtcatacccatgaatttggggtctagccatctcacaccaagatggtgtctttctttctacaccagatgtctcatatttccactcagcaaataatcttgtggtttgatccagcgaagtagatagcaaataattcccatcgatagaccatgcgacgtctgtcacggatttcgtagctcctgtaataccaagttcctggtcccataataatccatcagttgaagtccaaattctccaagatccagttttaccattggttagaataacatcctttccatcgtgggtgaaccatatacaggaccagaaaccaccagatgaaccagttgcagttgatgcacctttcgaggatagctcaccgagtctagatgaacagatccaaattccggaaatggtatcaggctcccaaaccatcacagccgtgtctgcagtagaagtgagaagctgtaatttcgttttatgccattgtaacgaagaaatccagtcatcatgacccatgatcaatgcttcaaaatttatggccacatggacatctgcagagatgtcaaacttgtaaatcttattgcttagcaaagtcaacttcttttcatcttcttcagaggtatcaatcttttcattagttctaattctccagagtctaatataacggtcctgtgatcctgatgcaagtaaataatcacccggtactgtttctctgaacaccaaactcttgatccaatcttcatgtccttccaatttggtagcaaattctagcttggacacaccttcagaatttgagacgagactgtaaatgaatacattgacgttggtaccaccaatagcgagaataaactgagtcttctcgatttcatgcattgataaacaaagtggaaatacacctttctggaccgaaaattcctcttgcaaaacatactgatcctcaatgaaagaccagactgagatggaaccatctgcacatccaacaaccagtaaattttttaaaactgcaaatacagtgatagtgtgtttatgatgttttattacttggatgcattcaacttcatccatatgcccttctctcaatttgggaaagttccacactctcacttcgaaatcttccgaagcggacaccatcatatcagtccccttcacaaacctgacacatgtgacttcggcagtatgtcccttgagagtcttgaacacgccgtgatgggaagtgtccatagacttccatagtgctatcgtcttacctgcaccatatgcaacaaccttggtagtctcctctaagtctgagacttgagtctgtttgttggcgccaatgaaaatagattcttgtgacagcattatgctagatgcagtgcactttatggagtactaagtgtacagaaccaagaaagtaatggagcttgtccagttagtgtaccattctatgtaatttgacggcatctcagatttctattactgaaaaaaaaattgtttccatgtacaatgagatgagatgagatgagatgagatggaaaacgatatgaaactaagtatatcaaaagaaaagaacatattaaattagttcaataaataaaccatccattcaatggacatgtagatttatataaatgttttgtaatcaccgtatgtacaaaaaaaataataaatagtaaaccttgggcaattcataatgtcatgatccctatattagtgtttttctggagttcagaagaaaggatgtcttggtaatggtgaaagtgggacaacttcagtccctcaagaatcctatcgctgagctaatgtttgtatgaatcttagtatatcgcatgggaatgaagattagttcaaatcagtcacgcaaccatgggaagcatttgaaaccaattttgcgtacttggataaacatcctctagtataacgtggaggtggagcagtccatgtacttctacgttcagcgatttcttcttctggaactaacaagtcaatcttgttgttatcagcatcaatgataatttcgtcaccgtcacgaaccaaaccgataggaccaccttcggcagcttctgggacgatgtgaccgatcaagaaaccgtgagaaccaccggagaatctaccgtcagtcaatagagcaacatccttacctagaccgtaacccatcaatgcagaagatggctttaacatttcaggcatacctggaccacctcttggcccttcgtatctgataatgacaacggttttttcacccttcttgatttcaccgttttctaaagcagaaataaagcctggttcgtcgttgaatactctagccttacccttgaagtaagtaccttctttaccagtaatttttccgactgacccacctggggccaaacttccgtatagaatttgtaaatgaccacttgtcttaattgggttagttagaggacgaatgatgtcttgaccatccttcaaagatacagccttagctgctctttctgctaaagtgtcaccggagatggtaatagtgttaccatgtaggaagccttcttcgtacaagtatttgataacagcttgggtaccaccgacggtaatcaaatctgccatcacatatttaccagaaggtttgaaatcacccaacaatggagtcttgtcactaattctttggaaatcatctggagtaatcttgacaccggcagagtgagcgacagcaaccatatgaagaacagcgttagtggaaccaccggtagcaatgacatatgtcatagcgttttcgaaagcttctttggtcataacgtcacgaggagtaattcctagttccatagtcttcttgatagcttcaccgatagtgtcacattcgttcaatttttcctttgaaactgctgggaaagaggaagagtttggcaaagtcatacccaagacttcggccacagaggccatggtgttagcagtgtacataccaccacaagaacctggacctggacaagcatgttgcacaacatcttgtctttcagtttcagtaaattccttggataagtattgaccataggactggaacgcagaaacaacgtcaatcttctttggaatcttagcagaaccacaagttggagaacctggcaaaatggtaccaccataaaccataatggaaggtctgttatgtctacccatagccatcaaaacaccaggcatgtttttatcacaagatggaatggcgatattggcatcgtaatgttgagccatcataatggtttcgaacgaatcagcaataacttctctagattgcaaagaatatctcatacccttggtacccatggaaataccatcagaaacaccaatggtattgaattgcatacctttcaacccagccttgttaacggattcggtgattctgttgttgaaatccatcaaatgcatattacatggattaccagaccaccaacatgaaccaacaccaacttgagccttgccgaaatcgtcttccttaaaccccgtggcataaagcatcgcttgcgatgcaccctggtcctttggttcggtgatgatatgcgagtacttgttcaacttcttgcccacatttctagtggttgaaaaccttcttacagcagactgtgaaaacattatctcttaatgatcttcggttcaatgtctatatcttgtttcactttcaggtgataatctttaacaagaaataaaataaataacaataacaacagtagcagtagtaagttagcaaatcccaactattgtacaaagaaaactttctatatatacaaaatacaaacgagaagtgatgtgatgtgatgtgttctgcgaaatcgtcttttcgaatattttttttttttttcattgacaaattttatgactgatggatgagatgagtcctttaaagatttgaagaagctgaaaacaagaacagagtggaggaaagaaaaagaaagctgaattctgtcagctttttggcgaatttcaaactttcaccggtaccggcaatatcgcggagataaaaaaaacaagatgagcacaagcatatataggtcacgtggtccagaaatcgaagcatcgctgttatatctttttgtgcgtttttttttggatcctctgacgagcgacgggcgacagattgttttcatatagggtataatgaattattattatttagaaaacagaggttttgccagccaagcatgctacacggagtgtgatcataattagtaagagagagagttaaatgttgggtgtgacttgtttggtctttgttgctcgatataatatttagtactattctaaactatgccggttttaaaacttcaatcagttattccagagtaaatgagtgtaactagaaagctcaaacaatgtcgattaatatctgtatgttattgcatgtcaacttatgtgggcgttatggcatttgtgttttcgtttccgaccacggttttgaaaaatgggtcaccggttcttgtttggctgagtgggtatagtctaattgtttgtctattctctcattatttggttaaacgcatttggtacacaagacccaaattttacagcttggcagtgatagcagtggtgggtgtttcaactttctttttatcaatgatttgcacttggaattttttatattacagtggagggtatgttcatggtatcaaattttggctatctcaaggatccgccacagttgatgtgacagaaagaatggcactcacaagtactgctggttttgttacatccatatttgagcttttttgcatagttttaatttatcttttgtaccaaaggctgaatctagattgggcaaaagccgtcatgtggctcaagaaggagtcccctgaaaaacctcctcttagtacccagttaacagaaaaatatggccattataacgatcataacaagggtatattggaaggaaatcttgactaaaaatgcaattaacttgtgaaaacctgtagagtaatgattgaatcatgttagtaatatcgatacattatttttacatttttttttaactagtatacaaatttaattttacatcggatataatatcatcatgaactgttcatctcataaccatgccatgaaactttgatcacacttcgccaaatttctaggactcacagcagcactgatagcatctaacacatactgagttgctacacttggagaagaactcatatgtccaaattgggccacctttcttataatcaagtcaacgttcgtcagaacaatggcatataagtgaggatcttcaacaatagaacggttcatgctactgtaccatgaaataacttcatcacggatgaatagagatagataggtgttcaattcatgatctggctccagcaatgccctggcaattacaaataatccaacagagaatacaccttccatcgcggaatcaccgataagcttttggatatttggtgtcattctaaatggaacaggttcattattatggaaaacaggagcggagtttggcaagttagtctcaaattgttttgcatattgattcactctttcataagaataacgagatggtaacatttctaaagtatgaacattacctgatttctcatcgacaaatatcttatgtggagatctattattaatggatagcataaaggtcatgaacacgaacgccgcatactgggaagcaaactgtttacggaataaccaaaaatcttcgaactctgagaataatttggaatagtagtctttcaataaagtcgatggaatgaacaacgaatgaattgaactgaaaatttcaactttcactgcggttatgtcgggagggggcaatactttgtcatgtgcaacgttaagttgttcagtgataaagtcttgaatagcgtccctatccatgttcttcttggcacagaattcgtcataaatttgatgcaatgttctgaaagacgcactgtcactcataacacgtacttgaggagatagtggaacagcgattggtacagtgaattgaatatcacgacgtctagtctgaacatttttacgcaatctctcattcaatagtctgtataattggaacattctttcctctcgcctagaatgacgcacggctggatattgtactgcgaatgaatgtaaagaaccatcgtgcccccttatcgttaatcttcggtgggatgtatgagtgccgcgtgtgaagtcgacttctggcataaacctgccgattttgacaaaatgtgtgttattgtctttgttcaatagatattgtcccggaacttttatatcttcaaacttctgatggtggaaattgctcaagtttggacaaattgcctccatactctctacctttggagctctatcaagtttattctcaagtctgttacgccagaaacgtagtctcttgatgtaaacttcgaagtctggtttactctcaataaaatcagcgttaaatttaacacgaatgtttggtggtaacaaattctctgagaatctgatcaaattagcctccgtgcttgagggtaaaggaggcttctctcttggataaggcaatctgttgtagttgtatgtaccatcaatcaatagaacattaatcaaccggaataaatcctcatctggattagttttgaacttttggttgatttggtcgacaagtgattctaatgacagagcgagtaatggatatgctgtcttcaaaataccattcaattcttcgagatattcccagggttgtcgattgttaggatacatatcttgatcttgggatttgttttgtgaagttgttcttgaattgtctggagatggatgcttggagttctcttgattctctgtttccgcaggttctccctgagttcttgccaaagctaagctctgtctctgtattacagcgaaatcttcttttgttgtccttaactggaagtgtaatgcttgaggataacttttagcaatacggatcaatattttgcggactaaaaaggcctctttatgagaaagagcagttaacagttgaggaatgaatgtaatccaataccaaacaggtatctcaccacggaatgagtcaaatgcgtaagctagtgagttagaagagtcgtctctccctagtagccacaaaattctagaaagtaactttcttgtttttgaattcttatacaagccagcagcttggaggtaacagctcatagcattactagcaaaactgatgttctttggctcttcagagagtctgcgatcattaaagaaaccccattgagcccatgcttttgcgagattcaaatcaatctgaacagcagttgcgaaggcttgattggcttcatcatgggcacgaagcttggagaggaacattcctttcaatgtgaaaaactcagccttttgaacagttccaaagtagactaaattagtgttgctaataacatcgagaccagttgttagttcattcatattttgataatgacatttagcttgttcacgaagtttgaggaaggcttcttgaatttctatgtttggcaaagtgtaaattctggccaactgactgatacaaacatcaggcatgttgtgtcttcgagctacatgagcaaagcgatttatcacccacgcaatttcatggtaacctcggtaagcatgtgtgttaatattactattgctgttagcttgctgtagtgctggtaccaatggcagatacgcactattgataacattgaaaacgtgttgtctccaggtgaccaaatcgtcccaaatagtaatatcatcccaaatattaggtagtctgtctctccaagcctgtaaaacacgtttaatttcttgtgcttttgtgtctagattttgcaccgtagtgctggctaaattagcatatatttgagtggcttctaagaactccatgtactgttggaatgaatgcaataatgccttatgtgctggggtgtagcgttttggtaaggagtgccatttttttaagcttagttgaataccttcatcgcagagacgtctgacttcttgatctccctttttggtttccccaaactgctgtaaagctaggaacgtttcgaatatctgccttcttggagttggtacatccataacactctttacagaatgctctaacgcttcacggtcggcattccattctgcaactctccatccacattctaacaataaatctgtgaatccttcgtgttttgctaactcggtgaggatatcccagtgctgcaatttactggcacaaaggatccagttatcttcccatagttcatattctgactcagaatagggcaaaaagccgcctctggccttgacttgagcagcttcatacatttgctgtgctttatcccataaaccgatttgttcatacgataaagctatgctagattctgtgtactttgcctttcttctccataatccatagaacatatcgtcttcttgtatactcgagtataactcaagcaaagcatcttcgtttgtatctagaattttactattatcgatattggatgtttcttgaatctgttcaagtaagtcgattgattgataccatgcattgaacgtaattcccaaatatcttactagatgaggtggaagttctaacgattcaattttgcttaccgattctaacattgtacttatgacattaacatgtattgacgcctgtttggtatgataatctttagatagaagagcgaccaatgatcttacaaagccgtacttttcattcctcggtatcgatttataagcaacagggaacacatttacccaggttgcgcgaacggcttctggactctgatagaatatatcaactaatgggttaattatgtcacagcatttaatagagtttattttgtcaatgaacgattgatgctctctaatcaaagactccaaagcggaattagtgataaccttatcttcgtcttcaacaataatattacgttcaatagcgcttagtggagatagtgggaagtgctcagtgagtttaattctatgttccatgacacatgctccgaaaagtaactggcaagcttgacttaaccacatataatcggccacaaattcccagttttgatctctaacaacgtaataaagcctttcttttatgtcattatccaaactgccatttaagatgttcattaatttcgaccttaattttatatcagaaatgcgggttccaaccaaaaatggttgttccattctcacggtaatttcactgttgttgtattttttattctcaaacaactgcaatattatttcataaaactgcttagaaaggtgaggttctccacgaatttcaaatgcaagcatctttgtcaatattgccgccttttctttaacagtagggaatatttcattggtgaaaacccaatttttagcgatgagaacaatcttctgcaagaaattctgatccatagaacgatcgattaacaaagcgactgtagacaaaaacggccttctggaatccccaagggtagatactttgaaagaaagtatatagaaaactttcttcaaaagtttcgtggttatacgagcatcttcgacagcggtggcgtcttttggctgggagatggttaaatgatccttacagagtttgttgaaagttttcatcaataagggcaataaaacatcgatctgtgagggaatattaacaaagagtgtccagcacaaaattacacctgcggcaacagaagttgttccattcaaattctcagatatgatggaactaaccaggttcacaaacactttactatccgtatcttcttcactctcaaacggaacatcatcgtctttgacagctgttaatacagtgcttaataccttttgtaaagcttcttgcaagtcatggtggttggcgtgaagacatttatccaaaagggtttggattgtttttagattattgatgatccatttggggtcttttgttctaaaaatgatatccaatacatctaaagcattcatacagtaatacaacaagttggctgattcaagatcttgctggatcaagaatttttcgaaataggacaatttgacaactgcctctggcaggtatccgatggatagtaactcagttaaaacagataatgcctttgatcccaatggcgtttcacaggccctatggttactaacacaaatgaaacgaatcaaaaacgccgcaaatgcttcccgttgtgaaagagaggtagaagaagaggtaactattccttcagaaccgtccatattgacatcggggtcatccttgctttgagccgaaaaggtttgtttttcccagtacataactagatcacaaagatcaatggttagcgtctgattttcggtagaagggttggttaaaagggttaatctaccaatgtatgatatgatgtttggaatgaacatatctttgtaagggaaaaatatgtccttttgacttattaagaattgatagaggatggtattttgttggaagttactttctaatattacccttcttacccaattaacccacgtagttggctcttcggaaccctttgatctatctgctactactggtgctaataagtctaatgattcctttaccataaaccttgcttcaatttgatggactctgagtattgcaacaaaaacttgggttactatgttgactggtagatcgaattttgagatgaacaatgacgtcgttacataagcagcctgtttcaactgaatgtcttctaactttatgaatttccatgcaaacttgatcagatccctttttaccggttcaagcaacgtaggagcgtattttaacaatattgaagtgagctgcaataactcaaatcgaatggaatcaagctttcctatcactgtatttaacacaacagaagaacttttcggattccatatatgctggttaagaaatgcgaaaatttcgttatccggacttatcaattcatccacagagttcttagtggtgctttcatgaatcataatggaattcaccactcttttaatgacgaagttcctagcttttagagaacgttcttctcggagagaaaactgcaaacattctaaaatatattttctttttaactgaacgtcgacacagctgataatatcatcaaagataaagctattcacttcatttgggattttgagatcattatcatacgaatactggatcatttctaagaaaagaggtacatcatattttttctgtttcaagtaggccaaataaatcatttggaatttttcaatactttgattcaattgaagtatatcaatattaaatgaattttcattgataagttttagaacagttgttaacattgattttaactcaaataagatatctgagttctccagtatccaactctcttcattcgaagtgtggtaaacatataccaaatcaattgagtttgcaaaaaagcttactacgcgaacagggttctctgggattttttcgacgtagaatttcaagaattcccttagctgcggttcgaaagcctttctcaaaacaggagcttctttcttttgtattatagaacacataagaagtactaattgtcttgatctcatattagttttgaagtaggtcagtacctgcacgtggaacctattgaggtactttgctaaaggtacacggaacggagagtctagttgtaaccttaacttacgttccagagaaataagcttaaagactaactcattcaaaaagattcccgcttgaggaggaagtaagtgaaaaatgttgaaaatactgcagatgatcttagtcggcgtttgctgagtgatttcctttccgaaaagagtatccaaaacctcgatttggcaccatgcatctaagtgatcggataactttttaccgatttccactttgaagtacgcgataaggagctccaagagttttgctagtgcctccaacccgggtacggttagtttctgatggtcagatagattcatcaacattggtttcaacccattttgcaatagctccttaggtaatttagaattttctgctaaaactattttcagcccctcatacgtcgcttcaataatctctggagaaggttttaacatggttttgaagaatacggctagtacctttattcttatagatccattctgcgcgttagcgaattctgggttcaataaggcttgtgcaagtaacctgatacacacaactcttaacttgattaactgttgggatgtttggtattcggtaattcgttgggtgctggctagtgatatgtcgtcggcatccactaaggcaattgattcgtgtaaaagacggaatagctcctcatcgaatttcaaaaaagagttttgaagacgtaaacaatatatcacggcgtctacattaccaatttgcatcgaaaacggtaatgctctcaagggtttagcaaagattggggaaagtagaaagtttttggcatggttcattaaagtaaccaccgggattttggtcagcgtagatatctttcccaaacattcctggcaaacattccttactatctcagtcggattgcttaattcgcagacaatatcagttaaggaattctgcaaatgtttatcacccaagttttcttctttgacatctgcacatgtaacctcaattacttcatatagcaaagcttttgcatcctctgtgatgaaaagaggggcttcagcatgagtgtcctttaacacaaacaataatcctgaagttagaccgtattgaaagttcttcacataatgtactggtagctgcagcccttgcaacaatgtttgtataccaatcatacccgcacgcttttcgtagtaggtttcagagtagcactgatgaataaaggttctcatgagggtagtaatgaaagagtgctccaggtagagcgtatccccatatatcactttccctatatcatgaaccttttttatcgcttctatagctaatgctctggaatcttcaaggtatgagcacaacccattcctaattgcttttagaaggatatcacagctgatgcttacatctggttgtttcacatcaacgctaaagacatgtggttgtctccttttctctgaaagagcttcgttcacttgcaaaagagagaaatgagtgacaattttattaactaggacagttacatcttcctgcagttcttttatagaggcagcataaaacatgcattccaataaccttaataatagctcttccaagttgttaaattttcctggatcaacaaccttttcatcattaaattggatattgtcttcaagttcttcggaattaagtagcttaacacctttctggagacattctgtcaaattcttaggaataggcccgacggatcccaaaagcagcatcaaaacagtgcttaagtacttgtaagcactttttcgatagaaaagattgactctataatcttttaagatatccgaagcagaattaactccaggagtaatcgacaatggtacttctgagttaaagccgtatatgttgaaccaagcatcaacctcaatgttaagttcagtttcggttttcaggtctttgggtgtctcaataaagcggcggtttcttccacccaacttgcccaaaatacgcacagtcgtatgacttatttggtgattgaatggttgcggtttcaataaatcgaacaaagctttcataacatcaccgacaactggttccaaaatcgggtctagatactctggagttagattgtcgatacataactccaaagtccttaatccttgagttatcaattctggaaatccaaccaaggcatacactaatggcttcattagataattcaaatatggtgccaatacactaagcctcacaggcacagtgagacagagctccacatacaaatcgcgttcgtgagggcgacaagctgtctggatcatcttattgagggactgtagaagagtttgaagtattggttttattgaacgatacaagttttcaaatctgccgccaccaatacttctgaacaatgttcttatcaaatagaaatacaccaaaggctcttcagcctctgtcgaatacttcaaagaatctaaaatcaaattattcaagtgaggtaacaagaccgcctcattggtaatagggaagagattgacagacatgaatgatagcttgaatagtctgatgagtatatttgatttgttactgtccacattccctagttctggaagtttggaattcaagaactttagaagaataccggtgaaattgggagatgtgatttcacttgtcaagaatgattgagcaacatgcaacaaagctgaatcgcgtagtaaagattcgtagataaagacgatttcactctcaacgatttcattgaagacaggactgtcgatttgcatgaaaataatagcgaaataatccatcaactctcgaccatctttagttgctgacacaggtaagctaggtgtagttatatcgaagtgtgcttttactgtggatggatcaatgccctctggattagaagaaaatagatgtagaccagctatacattcatggaacaaattcttcaacacgatcacctcttcgtaggaaaatactcttgataatgcagaccacattttcggattcattgtagtatattcatctgggggtgggttaaaaaccttcaagtcatgaataatggttttcagaaatgaaagaagagtacgatataagtaaaatgcgtccttaagaggatcatttgacgtcgcttggaagagaattattggagcatgattttgtatatcattgaagtccaatatctcaactgagttttctttgaacgatatatccgaatttttatcttgattctttacagtcagtgatgtgttattatcactatgcaccgaactgttacctttctctgatatatcaggttcttcgctcatagtaatatcaccatcgacgtcggcattggtatcaacagtaactgatgacggtaacaattcgtctgttgatttcaagatgttaaccatatattcatcaacatcgtgcctgtctttcgcaagttgatcttggatctccttagatttcttatttttactctgttcgtagacattatgttgttttaatatcttcttatgctgtgaatttaatagcttgaatcttgaagtataagcctctataatcgtcattagtagctttttggccttaggaacttcatatgcgtctttcttacctaaagttaaaatccgttctattaaattcaatagtagcttagcactcataatttgcacagtcaaagccaaagactcatccaaaagaaaactggtgtacattttaacagttttttctatgtcagccattgccaaatctgaccgaatattatgaatgaaatctgcaagggtactgtacgctaatggtctcaaggtttcatatgaagtgaatccatcaccaatcaagactttttggtcaaacatcaaattgatcttgggtagaaacaatttcttataacttgtagagagaatatgtctcgtagcatgtaataattctttacgtgcagatgataattcacttgggcagtcctgtaataatctcatcaccaaatctgggactttcttgacgtgtagtttcaaaatatctgtagcataaccgcgaataaacacatacgctaagaaagaagttgccttgatttgagctaggacataatcacagaatgcagagcggtttttgatttctgacgacatcccaataagtttttcacctttagcttctagttcttctctggatttttgctgttgtttcacttccaaagtgagtaagtcaatgacgagtggtaaaaaagtcggtaagtctactaaaatcaaatgtttatatgatgaaaataaggtcaccattgtaattgggcattcagacaaagtcttgaatgattctgtagctttttccaaatgtttcttggacggtgcagacaagttttcgaaagcatcctcctcattattagagttcgaaaaatcttgtgaatctgcagttgatgagctggtttcttcttcaccaaggaaagtagatgccaccaagttcggtacgttttcatatattccaacgataattttaatgaacgtattcacttcactttctaatggctgcttatagcatttgaacaacgaagtgaggatcttcatacacaagacaccattttcatcgttttctaaggttaatatttttaacaggcattgcagcacttccatggccataggttccattttatcgttaagtggacatctattcaaaagttctagacatgtatttctcaacttgtgttcaggagatgaggcattcattgagatttgatcatcattcaactgtgataaaatgagcggcaacaacttcttcaaaaactcatcgtattcgactgaagaagttacaacatccaaaacatcgtaaagttctgatataatggcatgtctttcagcaacatcttcagtatccctgattctttcgacaaaagtgtccattctctcatgagtatcagttgattccattgcttataagttacaatcgttgcagctcagctatattgaataaagaatcaaattgcagaccgcgtcttcctttgaaattaatgaattagggaggatgcaagttgaaataaaagaacaaaaatgcgaagctagctgatagaacctgttgtctagtgataaggcgctataattgctttggtggttgaagttcgtgtattcgtttgaaatcaatactacgcttttgttggttgagagtacagatttcaatgtcatatcgaaatttgaaaacaattggtaccaagaaaaacaatttgaaaaacctctgtagaccttgaaaagttttgtatcacgtgatgacattcctatttaggaagtgatcacgtgcatgatccgaataacttacccggctattaatttttcattgaaaattacgtatttgttttattctttgccatcatcaacagaaaaatacgcacgaaatgtgaacgttactctagcagataagcggacagccaatgtgcataattttttgagtgtcgaaagatagaacaatggcgaagggtaagtagcgctcacgataactcgtgtttttcacggacaacatcttattaaaacaagtacaacataatcgtcgattaaattcaaggcggctaacttaaacgaatatcgtttttacttaccaactcgaaaaatgaggcaataccccccctttagctattactggaaccattaactgcttctattgattggactgtgtgacgtaatctgtgtgcataaattcacagttcacaaagatctacatacggttctcaaaaaagggttcattcggccagcaccgtacagctctaattaagattcgacaattttgtagcgcttccctgataaccaggtgatagattgttttacattgtaccttacaaattccttcaagaatttaactctatccttgaaaaggcgctgaaagtagctctactacgttgttttgttcttcttcatctccatttcgaaagcctgtaaaaccagaagtacgccttgcattcatgttttttcaaccaaggctcagagtgtggcgtgaaattcacagatcatcatgtagaaaaaatatccttttccatcactttttgcatcacatttggtaaagaatcccgtaccaaatggatcacgtatttgaaaaaaagaaccggaaaaaaactggtgtcaagaatctgtatgacgataagtagacaggcaaaagctttgccagttattaggcaaaagaagttaaggaatcacgaccttgatccgcattatcagtggcataaagaccaggcgtatcagaacccttcaagggaaagaaaataatcaaagccgttaatgaaggcagaaagagagagagttttcctttgacaacttaaaaacctgtgtttccttaggctaataataatcagtgtataccaagtgaaacgtgaatgctgacgggttctaccagataggaacgacgttgtgccccataataatctccatactgtactggttttccttctgttgcctaacggtatttctttttcatcgtgtggtaatgaaaaatacgtgtagatacatactttgaatgcagttctgattttagagttcttttttttttcctgtttctggtatacaaacaaaatatacacagtgtattaaagaaaactgaaaatgtataaaatgacagagttgtcacaccggattagaagcaatttggatttgaagctacaaacgaaaataagcagagcctcgggtgtgcagcatatatcaacagataccgtgtatcctcaggcgcaacacctaccatttcgtgtgtgttaaaaaggtgtttatccttttatatctgtgctttttctttactctgttggtctaattctttccttttggattacacaccataaaagcatagaggaagcgcggtttgttcaacaatacgttcgctatattctggttatttttctttgatctggataattgatatatacaacggacctgcacaaatggaaaattatctggtaagtctggcactggtttttctagttcactttgccctcgctgcagatgctgatacacccagtgttgttgttggaagtgactatagtggattatactatgtgaattccacctttggaacacctggccaagagcagaggcttcggatcgacttgtcgcagccatacatatggttagtgtccggtgaaatttatcctcagtgcaacaaattaggtagcggatgtctaaatggatcactttattatccattacaaagtactactagtaacttagtcgacgatgattatattaggctgcagtttttagatttgatatcgataaatggtactaaatatagagacaacatgaatttcacccaactgtcaacactaaaaaatggaaccagccttaatgacagtaatgtgttatggaacgaaactcagggatggttgaccattaatagtacctcattcatacttgctaatgagactggatccttagttcacggtgctttgggtttatctgggcctatcagtgttcctgccagtgattcggtatcctctttgaactttgatgattcttattattttttgacacatctgaaaaatgcaggtgtaattgaaacttcttcatattcattatgggttaataacgcctccaatcatagtgtagatggtcagattaatagagcaaatgccggaacgctgttgctaggatccgttgatccgaaatattacgatggtgatttgatttcctttggctcaatcccattcaaagatgaatcatcaggttacctctctactggctatcctattgtccctatgtctagggtcagcattgccaacagcgaacaagaggccgtcaacttaacagacagcagtttcttgcaaccggttttcattcattcaagatacttgtacagttatttaccattgagtttgatcattcaggtctctattcaaacgaatgctgtttacgtggaatcattggatcgttggttagttgcttgcgatattggagacatggggtcaaatctgatattcgagtttggtaatctgaatatcagtgttccgaccgtagatttcttaggggcaacctataatatgtattctaattccagtctacgcttcaccaatggtaaagaagcctgctatttgaagatgtatcctaactatgctacctcattcagtgtcttgggtcaatctttcatcaagaacgcttatattgtccatgatgttgataatagtaacattgccttagcgcaggccgcctccgatgaagccgttgaaaaggctgctaacaattcacccgcgaagaagatagaatcgagtacaatcccatatgcattaccaaataatttcacttacgacctggctatgtcaaattccctagcaactatctcatccgtgctactgaatagattcacagcaaccatagcgtcagacggtgaaattttcacaggaaggtcattctatgacacttcaagaacaacaagttccagtgagcacacttcctttataggaccaccaggatcaacaacaaagaaaaactctggaacgccgtcagctgcagctgccagaatacaaaatcatttctcatcactaacatctccagacaaaaacatctggggagtttcattagcattggtcatttgtggcctctttggtttggctttgaccttgtaatctcaagttctgacaactttttttcgacatctaacgaaaaatcaaaataagcaggagataaagacttcacagcaaggattaactatagagatgtagaacattccaattatcacctatcattcagtctaaccattagtttgcatatgttttcagattccttatcattttaactcctgattaatgactttcaattaaccaaggtcaaagttgttcaacgtcgtttaagatcaactgacatctccgaatcgaaccctaaaaatcatttgcagtttataatgtttaatgttgaaattcctttttataaaatacgtacttgtcgcagcaaactgtaacactaatccatcaattctttagatcgttttgtcctgttgaagttttcccctcaattgttgaagctgtagttacattttgaatcaaacacctagcttcaaccgaatgaataaaaaaaaaaaaatctgaaaattaagtaaacatggtaagttgatgaaatcttacatcgtttaactatctaagattaggaagagaatgttttgtttgtcttattaggtataaactgcatcttaaacagtacttacatcaactgaaacttattgttttatatcaccgatccgcagagatcatagcaatattccatgatggctactgttaatggtttagccgatgacgtgtcaaatttgaatctaaatcagaccggtgagggttctatgcagcatgaaacgaagaagcatagaaggcctaacaggatataccataattttgagatggctggtcccagcttcgatcgacattctcctagttctagtcagcaatcaactcctttgatgcaacaatcacagattccatacagcacaccgttatcgaatgacaatccgtaccatcaagctggaacttcagcaaatggattaggtatcaatggattgagtatcaataccttaacgctgtcagcaccgcagccaactacgacacattttgtctcggctcaaagattggaaagtcaacaaacaatgttgcggaggacatttatgacatctattgattctgtccccccattgagcacaacacaatattatgcggaagaccaaggaacagctgatccaagattaatgtcgttgtcaatgtataacgttcctaatgatgaacatctcagagctgctaccaaacttcctgttggagttactgtgcagccgttcgcaaagctaattcctgttgattctataccaattgcagacgcaaccgcagattcagatgggcctatgcgttgtagacgttgccgttcttacgttaactcaagataccaatttacttttgattcaaaaatgatctgtaacttatgtcacataaagtcaaacgttccggtaaagcaggtatctccattagggctaaatgggttacgtgctgatgcctatgaaaggccggaacttttgaagggagcagtcgactttttggtcccatcaagttataatatttctcgtgaaaatgcgccagtgccgttacattatgttttcttactagatatatcggctttcgccaacgaaaataaaagttcacttgcagcaattgagggtataagaaccagtatcgaatatatggttgagaatcaaccaaattgtaaagtggccattattgcttttgatgaatggattcggttcttcaatataagggctgacttggaacaaactcaagaacacataatcaatgatcccaaagacatttttttgccgatcaataagggactatttgcactaccatctgaagcaatgcatgtcattcaagatgttttagtaaaactagaaacgtatatcacagacgagagattcttgcacagaagtcaatcatgttatggtagcgcgcttgaggcagcaaaattagcactagaagctgctactgacaatcaaggtggtaagattatagcctgtttgaatactttgccaacaactggtcgtggtaatctgtctctaatgagagatgatggattgaaaaagcatttgagatgtgaagatgagttttacaagaaattagctcatgatttcttgaagtcctggattggaatagatcttttcgttacttctacagcatatatcgatcttgcaataacatcttaccctgtaattgcaacctctgggcatctacaccactattcgaatttcaacatcaataaggatgaattcaaatttgttaatgacattttagggagtgtgaaatgcacagtcgggtatcaaggtatgctaaaagtgcgttgttcctccggactgtcagtttacaactattattcggagagtgtaaagaatactgatgaggaccctgtaatccctgtactcaccagagatcaaaagttcgacgtgctattcaagtacgatgacactctaaaggtcggagaagatatatgcttccaagcagctctattgtatactgatatcgatggtgtacgtaaagtacgtgcaattaatactaatgcagctgtcaactcgaacgtaatcgaagtcttcaagtttataaaccaagatgtggtgagtagcataatgatcaaagatgtgctagccacattggaagactgtaatttcaatgaaattaggaagaacattgaccgcaagatcattgaaatctttacacaatacagagcactgtgtggcggttcttctggggggcaattaatcttaccagattctttgaaaactttgcccatgtacatgctagcatttgagaaaagtgaattaatgaaacagaacaaatccagctcaagaggtaatgagagattctatgattattacaaacttctcttctatggagcttcgcaactttcatacaagctttatccacagattatcccattgcatgattccttgaacgaagacgatttgagtttctacgatgataaaatgcaactcttgcaattcaataatatagaaaccttatcagtacgttctagtcatcggcaattgataaatggtggctgttacctaattttccaaggtgaatcttgtttcctatggatgaatgaaaacacaaatcttatgttaatacgtgatttgttatcatacgagggaccaatcaaccaactggatatattcggtggcaggttgccagatttagacaccgatataaatatcaaggcccgcaatgtgatcaaaaattggagtcaaatcataaatatagactatcttccagttgtcccattgagacctaacgtggatccttattattctcatgtgatgaaccaactgatggttgaggataaatccatcgagttggtcgaaagctttgataattacttaatagcacttcaccacgatattaaggaaaacataaaaaatgataaatatattaagatcggtaagagcgctgaagatggccatgagaactttgcccagaaattcgtccacttctagagactttttttcttcatcgatcaaaaatgtatataatttttacatagcaaaaaattggaccttcgtcgtgtcatttgtcaatataataaaaaaaacattcggggagtttcatatgtattctaaaacctgtaattatgatttaagtttaattgtcagctctgtacgtgacacaattggcatttcatactagtaaaagacaaaattgactattaacttttcgaaaaaatacagaaaatcgtcaaaggtcgaaaaaaaaacaactaaaatccagagaaaaaaacatttgaatatttccaatgtaaagctttttcatcaatttgcactgtagggagagtaagatatcatctcgttatttgaaagaaaggtcgcgaaagatcaggccgaataaaaagcttttggacccccgacttcatttgaaaaatacactaacaatttggattacaattctttcagtaactaacgccgcgtataagcaaaagaagtgtgagacttattgccatcaatccagataaatcaacagataatcaataaacagaggaacttactgacatgcacagatcgaatagtcagagggccaattcacagcgtccatactctttaaacaatccgttcagaaacgcttcggttgattccagtataaatcaatacgaaacagacacagatttccagaattgggtttcccaaaacacaaagcctatgccatatgctactggcagaagaaatgattccagtctaagtttcaccgattctatcaatgaaacccctgaagaagaagatcacaacacagaagattatttcatcgacctaaacactactaaggatgtaccaagaacgtctcgcgaagcgattaaccgtaacaagtatgtataaaacaaaaaaaaaaagacaaaccaaatcagcaattgagcctgccgttatctgctgataccaccctattactactactaattatactactaataactgtacctctatcatctgatctgctctgtttcgtgtgaatattctccgagcctaaatcccagtgcctttctgcttgtattttccaagagccgtctaaactttaactactaatattagtacgtgccatttccattatatttccttatctagtactcgatcaaatggcaatgttacccgcacttcaatgtgctgtcagatccggaaatcgaaaaaaagggttatggattcaaaaaggatctaggttataattagcaccagcaaatgggcgatctgcttactactcgcagatagcatattggctgttttggttaatattctgcttgcccaacggctgctattaatagtctaagtaaggaaccttgggattacttcggggcatcttaaataagggtgtttctgtccaaagtgttgactcagatacacatacacatacacataggcgtacgcatatatatgtgagtgcagatagcttgtctttgtgctgtgcgttgtgtgttgctttcctttggctgctctcgttcagtgatttttcctttgacaaactagtatttctacatatctttgtcagtgaaaaatctgaaacattaatatggcttggcatggcattccttcattttttcagggtaaaattgcagaaaccgaaagacaaacagaaaagataaaagagatcagttaaaagttaaatgggctgctagacagtagttttaatcttaccgtttacacaatgcattatactaacagtttattaatatttttttgattatttcttgttgtcggttcctcttggtacgcatactcacattcatagccatcttttaggtgaatagcagattgtgataactgtatgcgttcgaagtccgatagtgaaatcaaaataacatttttaatagcactatgtctcctgttccgcgcgcaaactcaaacaacccgttcttgaatgatttgactgaacaagagataaataaaggttctgcggtttccagaactcattcccaaaaacaaactcaacctccaccagcaccccagacctcgaagaaccatatgacctcctctgaagaaaaagaagcattaagaagacgatacctgcaaattgacaacgaggacattgcttctcctcctcgtaggagctcccatagaaataacagtgcaactggtgagatgccaccttcatacgacgaagtggcgggctctaaaggtagaaacgctggctatccaaaggagaagtcatccagcgagagccgttcacgtcacgatagggaaagagagcctagatatggtgatagagaaagagacagagacagagaaagaaggcaacaccgttcagattctgggaatgcgaccagttcgcgtcgtcatagaaaatcttctggggggaaaaaatcaagttcatctcctgagaggaaaactaaaagtaaaggtccattacctaaaaacgttgataccattgataagttagatgttactgggttgtttggaggtgctttccatcatgacggtccttttgatgcgtgtacaccacaccgaaacaagaatgcgaaggccgctccagtgatggctttccctgcagatggtccaaattctagtattgctggcccaactgggaacaagtcctttatcaaagaagtgtttggccataacgatgttgatgacgatgactatttatataaatcaaacggtaaagtcattgtaaattcgagttcatccacagtagatgcaatcaagccaaattctaacagtattacacaattcgatcctaagatgaaaacagaattggttcacggacctaccacggcaggtttgggttccacgacattcttagatggtgccccagctgccactgctctagttagagatgatgctggccaaaaagaatatggcggaatacaaagaaagaaatctctttcgcaaagactaaaagttggtacaagcagaaccgatgatgttagactaaggaaagtttcctcagattcaacaccaaattcaccttcgatgcttgaccaaagtgatagttttgaaagacctcgtgctggtaatttcaatggcaatgacgatgacgaatatttcttggatggtaactcatctggtgtacgttttgatcagaattcaaagaaagaatctacaggtaacaaactattaagaagggttaagagtttgaaggttagtaggaaataattactgtctccttttcttccccttttagccatcggtgtgtttccttgaaccttcatctttccggttacaacatattcctattgtctaagttttcactgaaaagaactcagtttctcgaggagtgttgtttacttactctgcactttttctatacatatatggatgagcagcctttctcgataatatttaaatgtttgcatattcaataagtgataccccatgttcagaactaagaatctttatacatcgttcaccgaatataaaactgcaaactatcgttccaaattttttaccatttataacatttgtggaatctttcatctcctctgtaacattattcttttttatatgtcatttcttttagattcatgctagttattagtgctagatgtttagttgagctttgaagcctgatcgtgctagcacttaaaatgctctgagattttatgaattaagttacgtattaacaagagatatctatgtacattcgttttatttgtttttattcaactgactagtatcaaatggccaattttataaagtggcaaaggctttggtttcaaatgcaggtaatctattctctaccactttccactcaatagattcccaaacgctgtccaaatactgctgctttccgaatacaccgtaatcaggcaaccaagcctttggggatgcatcaatggcaagtaatgggaaatattttgttcctgggtacattacggcatcaacagcagactctactttgtcggccttgaatccttctgtctttttcttgatgctttcctgtagatgtttgaacgatcctgctctgttggaattgaaaggagatccggcgttgtatgtgtttacaatgaataattggtcaaacttgatcgctgatggatcagcagtcttgaattgccttgctaccaaccatgtgtaaccatcccccgatatagcattgttagaattcaaaagtaaagacctgaattcaacgatagaaccgaaagattgaaccaacgcctggtgcaacctttcgttacccatcgataaaggttcgttcccgaaagttagggtcaactctggtgtcttcaaaagttcagatctgttcggtttttcagtgggtagaggtaaagaagaacctttgagcgatgacatcgagaacttcaaattgtatagaagagatgcatagttgaaaatttgtttcttagaagaaatgttggcgttttcatgtataattgtctctaatggcttttcatcggtgttggcagtgtaagaattcaacttctcggtataatactcagctctatcaaaccacgctgattgtaaaccttctttggaaaagagtccggaaagaccacgatctttgttcaaatgctcaaaagatggcacaatgtatgacctaaaaaaggttcttttcaacgttgagcttcttagcattttccttaaaaccactggttactagtgaaggatattaactgcgcaatcagatataacggtgcttttcgttgcaggtttaacaagggctttatcgatcgctccaacgtttcaataatttttcaacttttgattttatctcaaactaggccggaagaccttgacaacaaccaaaaataaaaaataatcaaatagttgaagtcgtgggaaacgatagctttggggtaatgaaaagtatgtgcaatccaatcacgtgattgttgcttttctcaaaaaggtcgcccaatagtgaatgttccgaatgacttctcagggttctaggctggtccagttgggcaacttgtatgccaggtaccatcaagagaaagatattatgatgtcactggtagctagactgcagaaatatatttctagcgcaggctaatactcactatctaaaaatttatagttaatattcggtatatgcactgctggcacgttcttgtttgattgcggccagcgtaagtgtcaagaatattcaaataatctgacgttttacgtaatagggatgcatagatatcgcttcttgagctttttaaggtaattgggactttgcaactctacacgtgttgttttgaaataaaggcaaggaacagaacgcgtaatatatgtttagcatgtgagagtgtattcttttattgaatctaagagtagattgttttctattttgattttcggttcgcaataaaatccagtatccactacacgtgtcgctgtcagttttaaaacacaagtaaaagacaaagacgtggtaaacagtttacagatacattattggctgtcgatatagttcctaaatcaattaccatataaatgagacttcgaaagctttcatgagaccaaattgaaatgtatttaatgtgtaaaataatttgacgtcagaatatggtcctgaaaaatactctgatgtcaaacgtagctcgaacatagaataagagcatataagcagaaactaatagacagaattattagaacaagttatcagtaatttgatttaccatgaactctacctcctcttcttcagaggaagcgttgagttttctaaacgaaaacgtccttggtgtcatgtttggttatatgaaacatgtcgggcaagagtggaacgaaaagatgagagaatctccaaaggttgttggggctagtgtcggtattatcacaccactagttgttcttcttatgttcagcgaatctctccgttccgttgtacaattctgctggcagtgctttttcaaaccgtttacgtcagtgacaagcaacaataatcagcaagaaaacttagaacaattctataaatcccaagccaaactctacgatcgtacaaggggtgttttactccaaggtcgtgaaacaagccttaaattatctctttctcacctctctgaaaagaaaggtaatgtctggattgatgtcgggggtgggactggtttcaatatctcccaaatggcgcttttaacaaacttggatacaacgtttgacaaaatttacttgattgatctctctccatcgctatgtgaggttgcaagaaaacgttgtaaagagcatggatggaaaaatgtggaagtgatctgtggagatgcttgcgattttgaaataccagaggaatcagctcagttgatcacattttcttattcattgagcatgataccaagtttctatgcggccattgatcacgcagtatctttattggatgctaagaatggtatcatttcgtgtgttgattttggtgtcactaatgaatctatgctagtcggaagaaccaacactttgggtggtctagttaacagacatataccttggctattccgtacattctggagattgtggtttgaattcgacaaagtgtttttggatccagctagaagagaatatcttgaatatagattcgggacaatcaaatcattgaattgttataactacaagcttggtaaaattccctactacatttggttgggttgcaataaagaccacgaacaacatcttcaagctagatttgttgaacttgcaccaacatctccatacctcgcacctataaccacgtcagcttcctctaacgctcagccaatgaccaaagctatgattgcagcactagaaaattctaaaaaaggtttaccatatccttctctgttctatcaaaaggagcattggagagtgtactatgatgaagtgaaccctgagtacagccaatttaagaacagttatatatacgcattcacatgggaagatcctagagaagatgttaacattcttaatattcaaccagaagataccattttggctattaccagtgctggtgataatattttgcactatgccactttgcctaatccaccgaagagaattcatggggtggatttaaatccatgtcaaggacatttgacagaattaaaattagcagcgattagaagcttgagtttcacacagttgtggcaaatgtttggtgaaggtaagattgatagattcaacaatattttactgaataaattggcgccatatctttcatcaaacgcatttcaatactggttcgaaaatggaacgaaaacatttgatcctaatggagccgggttgtatgacactgggttcacaaagtgggcattaagacttgcaaaatgggtattcaaagttgcaaatcttacagatgaagttaatatgctatgcaaagctaagaccctagaggagcaaagatctatttgggataaaaagataaagccggtccttttcaacagagtagtgggtaaaatcctcgttggaaacccgttatttttatggagtgcacttggagtaccacgtaatcaagcaaaaatgatgggctcttcaacattgcaatatattattgacactttggaccctgttattgataattctttgatttccgatgataattacttttattatttgacattgaagggaagatattcgagtagaagttgtcctgattacctaaaagagggtggattcaagtctctttctcgtgaaagtcctgaatctcctctagatagagttagacttcatactgacacgttgaaggatgtctgtgagcgtttgtcgaagaaaacagtttcgattgctataattatggatcacatggattggtttgatccacaaggaactgatgttgacgaagaaattcaggctttgtggttggccctcaactctcgcggtagggtattattgagatctgcctctaaaagcccatggtatatcaaaaacttcgaaaagttcggcttcagttgtaaagcagtaagtgcaagataccctggaaaatgtattgatagagttaacatgtatgccagtacctgggtttgtcaaaaaatctccacggcatctcagagcaacaaccgtagattaagttctctcgatttggagaataattaaggaccataacaggcaaacaatttcataaatagaacttgaagatgagatgtaatataaatacaaatgttgaaaaaaaaaaaaaaaaaaaaagatacacaaatgaaatgaatgaagtaatatgcttattttgtctctttgcactgagttcgctttttgctttcatcttcagtctttccaacttccttcaaaaatatgcttaacaaatgccatctcgtcgttgtcttctttagcgcccattgttctgatacctggtgagaaagaagtaatcggaagtaccatgatgtcgtccactagaataggctctgtcatcaatgaaaagaatccccagaacaatgagggtttgtcgttttgtaaatttttaacaatgtctttatagaatctcatagttgtatcatgtttggatccatgtttgttgataacattaagattatcattgaaaattaaaatgtcatcattcttctggataacgttattaagatactggaaaataacatctgaaaaaatacctggaccagtccagttcataatatcggtaccatctgtatttttggcggttttcttttgttgatgtttgtaatttttgttgaacttctttttatccctcatgttgacattataatcatctgcaatgtcttttaatacttcagcatcatctaaaggaatgctgcttttaacatttgccacgctctccaatgttgttgcggtgatatttgtgatcaattcgcgcaataatggatggccagattttgattgtattgtccactgacagaattgtattctcctggcgtaccactctgcccaatcgcttctatccggatcagcctcgataccaatgacaaagccaggttctgaagcttctagcgtttcaaggttgtccaaggaatttctatacctttgtggattctttaaactagaaaagtaggactgagaagtcgatggccatgacgacaatggctttaatgggaacgtatccatgtcagaatatataccacctcttgcataaaggatcaagtatctgaaaaagtctgctttaagaattggaagtggcaaggattcaaaagcctttatcacttgtgggaccccaccatatagctgctctagaagtggtatcatttgatcatctgtgattaattggtattgatatggcggttcctcggatgcactgaaatgtttccaatcattctggcattttgaaatggaagaaacctgtgactttgaactgggatcaatcttccaggtctgccatacctttttggggatgggtactcgagaatcgtaggggaattgactagccaattgaactcgtagatccatcaaatgatcaccgttattgctcgtacctgctaagtccaagtttttcaagttcaagtgatccacgcgagctgtactgggaagcaccgtgccaatgctgttatagaaatggtgattcactttcgcagtattccattgcacagaaaacaataagtacagtatcagcacaatgacaataatgtacctcgttcttcttgaaatctttggtaaccccattgtgcctgtaaaattaagaaaatgcccacaaatttaatgtttttgggatgttgtttgtgaatcaaacgattaattctctctatcgatccctaagaactttttatcattcaatgaagaaaaaaacaacaaacagcaagaaaaaaccaattttctaaacagtaaacccaattaaattaatgtttcgcacacgctccaactgttgttaaaacctacacctcttgatctatgatacgaatgtatatatgtacagaatgtatatatgtacagaatgcgtttttctttgcagtggtagttaatcatttgatgagatttcagcatgaaactatatatgaaaaactgaaaaaaaaaggtctatacaaccttagcgaagtaaaaaatctaaaaaaagcttttgtactggccagaatcgacagacgggcgatacggtcgtttgaccaagagaaagaagatgcagagggcaagtaatggattcagggttcagttcaatgatatgagttcatagaggggttcataaatacaatcagcggtcgacgtgtacatagcgggtattatatgtcttgtgtatagttttgaagtttcggtccatataacatgtccagatcagatggactcttgaactgagacctcatttttggccaattcctggatgaacgattcaatcgattgcaaatcatttgcgatagctttagtataatccttgagtatagttacatggtaaccaaggtttgcagcgcttattgctgagttttttacgcagaaatcgaatgcaagtccgaccacatagatttcagtaacatcattctctttgaaaaaggcgtcaagttcagtgtgatgatcattccagatatcgttgaatccggaataatactcacgatccgataagtaacctttattgacaatcttatgtggcaccttgagctttaaaatttcagcgagtaatttttccggaacctcagagccccatgtctcctggacacaatggactggccataacgtagcactttgtttctcggtgctcccaggaacgggtgagtcgtaggtgaatgaactgaaatctggtaatccatggttctttgcaaaagaaatgtggtctggcggatgccagtctttagtcatggcaacacagtcccaatcctgatcttgcaaaagctggatgacaggatcgatgatagtatcaccatcttgaactgccaatgatccttttggtggtaagaaatcgttctgaatatcaattactaataacgcacgggctcccatcgttaacaaatacggagtctcgattacttagtgatgtttgtgtctcacgttttttcaccgttcctttattatctccctaatttttcaaacggtttgttttttcagtgcaattttcccttcaagtatgtgctactttatatactaaatacctacctaaccgagagcaatgttcgtcgttccgcagaaaatgaacagtcaagacagtggttggtgctaattgcctgccttgtatacattggatacactgctgctttgtacggccgtagcatttacaatctgaaacatatctactttatactacgaactgatcaacccttttttaatttttcgatccttttttcgttattgtctcatagtattgggcgtctaaatcttgagaaaaaagaatcttctgaaactatataaactaaggggttttatcttggatcttaatcaagagaaataaagtaatgattatcccgaacgccagaagtgacattacttcggcatattttggagctttgattgtaaaaaaaagcaagctttctttctggtaaagatggatggcatatcctcaataagtttacaaccaattcagaatttagatggcttatttcggatattggcggctaaagagacagacgatttacacaggattaatgtttggtataaattacttgaaatattaagagtagccgggaatcaagcggtatgtatcgatcaatcggtatgtgacaatttattgtccagattattggtttctgtttctatggttgatgccgttgaagaaggtattgatttgtttggagtagcgtttacttattgttccgtaaatgaatcacttcaaacacttgtatttcaattcattagtcaacttgaagaaaattctaatttgaatttattattccttaagacttgcagtttacgaccccataaagatcatgttcccgggttctacgatataattttccaattacagactttcaaaacattggatgcaaaggtaatgcgattcttagaccttaacttgggagatgtcatattaaattcatggattccgtcttggaaatcgtggatcgactcttttaggaataattgtaaagattttgacgttgttcattttttggtacaggaaagaatactaattaaaactgtgcaacgtcatgaattggatatggcaattgcaaactttcaagtttatcctagaaggttgaaggccttattaaatattaagacggaagccacacaatatctatctctcaaattcattagaagatccttaaagttctttaaatggttgaataaagacttgcaaggaactgtcatatctttttccagcaattctatgaacaatcacaccttcgaacaactctttcatgataatggagaattctatttgcaagtgatcatggagattgtcgatcatccggaactagaactcttagaggaatctcatctgttactgttactaagagtttctttgggacatgtgtgggaaaagtgtatcatgtcaaatcaaatatcagaagtgcaccatactcttggaaaaatgggaacaacgcagtcattgccgtctttaattaaccttttgcaatatattttatcgaaatactgtattaatgtaatggaatgcattaataacggttatgaaatggaaactaattccctttggtacagacaattaacgaacttggccatcccagcatggtttgaagatttgagtccaaagattccaccagtatctagggcagtatttggatttgatgacaacaggattgaaaaaggacaaatgattaacagttttcaagagaactttagtaacatttttgagtgtatgcaactcactttatctttaaatggagcacttttaacctactatggaaatattggcttaaatccactatgtctcggatcgcaagctatgtcaaattgcatttctgatgtacaaaataagacagtatcaatgcatttcacaatttacttcgttcctctttttacagtgcttttgttatcccaaaaattactcgagactgacggcgctagtaggacttttttgaatactgaagcagctctagtagatgcaaagcagttattcaggcaatctattaaacaaattgagtgtatcattgacaatcatgggaacaatggattgtaccatcttatcaagtttgtgtcccaggtaagcatagaaagtttgctctttcaggacatctctatgataatattacgccatatcttctttgagagtgatggacaatggatcttacagttatgcttagcaaatgaactgacaactcatggtttgcttgattacatcgtattatggaatgatggatcaaaattgtatagtcctttcttcacagaaatcttcaagcaaccgcaaccagaaatccttagaaaaacagtagtacttggtgacttgtttgagctacttatggaaaaaacgaaacaaccatccaaggaaggcatttcacatcctaaggtaagatcaaaattcaacactaacgcaagctctttcgttccacaagatactagtatgcatacccgcacaccgaagaagattgaacaaagtccacaatatcccgtgcatccttctctcagcagctatggattcaaacctgtcagtgttagaacaacatccggggtttctgcaggtatgaatacttcgtttgcagattgcttttcgggagtgtttaacagcgatcagcaatcaaaagcccagatggtgcagaactggagctccccacctccagtgtcacaatacaatcaggtaaactccacgaaacttgttaatactggcaaaagctacatcctaggcgggcataatagagcagtcaataatagcaggactaaaagtgtacatgttgatgattttgagcagcgttgaataactaactcgctataattcgcggcaaattgaacgacaggaacgtcaaaaaatgacaaatttcgagtaagaaagatcttaatcacgtaaatttgattataaaatcatagaatgctgcgatcaacggacccttacgatctctcgccattttgatttatgctccctctttataaccaaccattttaggagagaaccttgaaaagaataacgaaatgattatgagacgataggtaaaaaaattcattcagtagataaagtataataattacaaaaaaaataaaatagtagattgaataagaatgaagttaacttgagctagaaaaaccgtctgtactcaagcgaattaatcttggaagaaattggaaggaagaaaagtataagttcgaccctaatcctaatgttgcacaaacatgatgaaaaaataaaaaaataagagaaatgaaagaaaaaaaaacataattacctataatcttccgtagtgtgaaataccttcatctaaaatcccaatgttgaaccactcatgttcaatcacttccttcgccgttattcttttcgttggatcaaattcaaacatcttacgacataaatcaacgaaataataccaaaacatgaaaacgttcttatcaatatttctggaatcaatattttttgataaaattagacgccagttgtcctctaactgcatatcccagtgaatctccagccaagatccatagtccatttgtaactttttggagataaaaacatccagcctgtcacatgttgccaaaattcttttccatgacttttctttggtaatgacttgaccttttgaattccggagaggccaccttaattctcctgtttgtctgtcgaaatattttacaactgaagtttgcaaatcagttgggatgctgccatacttgttttcaactttgaagaacattttttcaaccatctttttagggaatttttcattgttgatacgttgcatcatagccatatgctctgtattttcatgaattggatagagtgactcgccagtaactagctcaaccaatacacatgctattgaccagatatcgcatgggaaagaccatccaagccctaaaacaatttcaggagctctgtagtgacgcgttgaaacgacaggtggatggtattcattgtagaatacagcacttccaaaatcaattaatttcacctcaggatttatgagtatttttctctttccaccgctagccagtttccttctttcagttaaagagtctatgatttccattggaagtgactgttccacgcaagtttcatcacatatcaatatattctccggtttcaaatcagtatgtattattcctaaatcatgcaagaagcacacagaacgtaccaactgtttaccgatagcttgaacatgggaaccagggaaccttgcatatccattgtttgtcataaagtcatacacggacctgccgtataaatcagtgaccaagcatatgtgattcttgtaatcgaagaattctcgcaacagcaagcattgatattggccactcctgtcattttcctttatagtctgcaagacacgtagttctgtctttgcagcttgccgatatctatcgacagctcttatgattttgacagcaacagtgatatcgtttaaatagtccttgcactttaccactttcccaaaagtaccctgtcccaaaagctgcatagcctggaatctgttcttggcaaaaatgtcattctcctggtatacataatgaccttcctcatcagttttgaatctatccatagaacgtaatttgtcctgatgggagcccaatagcggagatttctttaaaattttggtgaacctggatggagatttcgaggcagaatttgagatgtcaaagttctggtcctggttattgttttgcataccaccattttttcccaatctgaaatcagcaacaggtaccggagacaaagatctgatcaatggcaatttaatcaacttgttcccatcaacagtttgcgtcgtagtaccgctgacatgcaataactcgtcatcattctgtgtcctcctatccgtatttctgggttcgtagagtagtcttgcatgcggtaattgtggtaaagagactgttctttgcttctttacctttttggcactcgtatagttgacactattgacaaactccacggcactgtcgtccaaatctacaagatcaaatccgttcccgttttcattttgtttactattcctattattagcagcgataccggtaacaaaagatcctgaattctggccctgtctgtcaacatccaacagaagcgtgccccttaacgaatctgccgtcattggatcgttgttggatgacataaattcctcgatgaacggattctgcatccgtccagtatttgaagcagaagacgttgagacatctgcagctgcggctgcggctgcggccgcagctgccgtcattataggatctgacatgtgtccatccatatattgtgatctcagtgtcgagctttcattaatgccttccaaagtcctggttcttttcctcttggcagcaaaattctttgaggccatcgtcataaattagtttcctgcggtggaagaagcaatttctcaattaaaaaatgtgcacttgtcctatgctttttctttactttagaaaggagaccttgatccctctcctgcaatgttattttatttttaaattgctaatctttcaatgataagcgcaaatccctcgtccagctaacactatacctcgatgaaacgtacctgctctctctttaaatgtctgtttagctttgctgaacaagtggtctgctaaaataatacttggcaaacaccgtcatttatatatagtatatgtatttattcttggagattaattaaattagtgaagaatcatggtttaatcatttcgaggggagaatccatcagaacggaaattttaccctgccaaccgatgattcaaaaaaaaaaaaaaaaaaaatttggcaaaaacactcaagtgcaattttttcccaagaaacggcagtaagaggagaaacaatacgtcgttagatgcaatacggctacgtgggttattgattattaaacgttggttgttgtccatatatagctataaaaaagaacgtggtttgctagcttcttatgagcgtgcgagcaagagttgcatgggcagccagcctaacctgatcccgataaacctcagctaccgagctgctctcttctgaagcggctttgcaagggttacggatgatggtggtacgtaattataaagtgggtacgtctttgctgggtgactggaatttcatgtttctgtaagattctcgggagggtaacaataatgattatgataacacccaaggccgttcaacagggtctgggccctcctcgaaacaaaacaagttttgggccatgtatcatcattatttacggatgtgtcgtgtgacactgagatcttcgctcttatttaccgtaatatacatataccaatgcacatatctgtgtgctttatatgtataaatatgtaaatataaaatataccatcctaattacctgtatttcattctgcatcatattgtagtatacgatttgtataaaaaagttcaaaagcttattatcctttaaggttaaagataaaaatcaacacttgtggcacttgtgtttcttctcgtgtcttcgtaaattgctcttgacattgtagctcttgttacaatcaagatatgtacatttgaacggtttcgcctgtgaatgcaccactatatgtgttttcaaagtgcttggacgagagaattctttcccgcaaatgtggcatttcttacagtgtattttcttcttgtaacgagccccacgtccttgcttttggttccattcgtggatgtacccgggttctggtctatcgtgcagtagcttttcttgcaattgtttgaaatctaactcagacaatgaatctgtggaagagcatgaagagtctgagtgggctctgggcctaaatattgcgtcacttgtgtctatcttattttcagcttttacttttttctcatcggcaatggtcaacgggggacttatcgagagtttagttattggaggtaacgtccttggtgtatcatcgaaattgtctgtgtctgtgtagtttactaagttacgaatggatggaagaagcgaaaattggttacaacttagtgtcgctctgcctcgattttctgccatttcctttgggctcttgggtagtggtaaaatcatcttcttatccattatgtttggttttatttttatgttatctttttatttgcgtcagcgtgtgctgatcttatcccacggccttttacgtctcctccgctggtcaactcccgtaaagaaaatgctttttatatgcatatatatatatatatttatacactgttacatggcttcagacatgtgccaagcgggtttactagaaacctaccaagaatgtcactagattgccgttatgattggcatatataaaacacgtttttcccttgctcatgactcgtggtccctcgagtggaagagaacaaaaattaattcccaacaaagtacgcagtactttccaatcattaccacgtgaacttgaacccacatgcagcaccatgcacggtcttttcttgataaagaccgtgcttttctaacaatttccttttcgttttacttaagatgaggtaccttattaacattacgcagatccatgttcggcgtatttggttccacgtgggaaattcacgtgttggctgataagctagttatcatttcgggacgccctgggttttttaaaaaggtctgaaagtcatttgcatccccgaaatctgattttggacgattacccctcctgttacccggacatgcgacggggaaatagacatgatctggcccaagatgttccgtcataactgggagagaacctctgtgctgtaggcctgatgaagacatactttagaaacgaaatacacatacatatatatcctggaaaaactgtttacgtatggtatatatcaaattttaccctgaatcacacatcacattcttacccttaagagatcaagtattttatggtattggtggcgaagcttatcagaggatttgtaccaaatcctaggcacggaaaacttgcgcaaatgtgggaattcaagtgggtacattttcctcatttttctctggtacctatggatagcagcttgtaaatttactctgaacttgaatagtgattgtcgttgacggggccattgcgtctccttgtagctatcgaatctctgtttagttagcgagtagaaagcagtgatccggtcttctgctgtttccttcgcattcttcgtccattccttaacgctttcgaagttttcacgcctcaccgttgtactgacccagttagaagttgctgcataagtaaatttcaacttcttctgacatacttcgtaatattgctcaagagaagggaagctagggtaatatgatgctaaagtggatggaagtggcgttttcttcacgtatgctgcttcgtatgcatgggccctatggcccatgtatgcatcaaattgacaagccaatctgtccttgaaagctagtgaactacactctaactcgttgtttttagtaaaactgttaatatcacggatgaaaacggtcaagaggcccatgttgatgagaccggccaccaacgaaattccaagaataacggattgaagtttcgtcaagcgcgctgtccatgtattgctccttgctgttgtctttgcaggcgcaacgttggataatgaatccagtggcgtggataacgacgtagtattgttactatgattaacgctccctttcttattctgcaacactgcggaatcctctaagtcgctgcttgtcaccgataaaatatcgtccatttcaccagcgtcaagatccctgatggaatatgtaccgtccacaccaccaacgaccccccaagtgtcatttccatccactgatgtacatctatcttttacttcagccatcgcttcgctttaatcaaaaaaaaaatctcctagctccttgattttacgcctgaagcttgatctacaataagtttatactgacagaattaatactaaaatgtcacacttaatatgtctctgatattccaataatgatagttagttgccagcaacgttctaaaattcttatcagtcctatatatatttcttgagtataatcacaaaaccaggacgcctttcctttgttctttgtttcacattttcgtttccgggaaaactgttactccttgttaaccattttttaatccttattccttttatatttgtcgtatcaaattcccttttttcacaactcattgacctaaataaggaagggaagataaagggagcctgagaagagaagactgcgaagagacaagtggcagatgcggtgcaggtgcagtgcatgtgcaggagttagtgatctgcatcaataggtaatatgttcttgaacgctttctttttttatagtattaaaagaataatatcgactatttaactattatttctttacacttctgatgcagttctgctattctttcagctgtatccatgaatagtttgaactcttcgattagaacgctgacgataatgttaacaccgaccttggtatcatcatcttcggatgaatcgttcccaaagagatcattctctagacctgacactgcgtcgtcaatattgcttagagtgtcgttgtagtcatttaatttgtgtttgtatgtgattaatttttcctggaagaacttatctatctcaacgtttgatattttgaatcccttactgactagttgttgcaacattatagcaaaattttccaattgtttaacatctttatccactagtgtcttgatggcatcgattcgtttcaaatctgatgatagtgatcttgttgcgttgaaatgcaatttttgtagatacttgatgtcacgagggattgaatccaatagttcagtttgatcttgtagatcagcttcaagatgtttggataaagacacttgcgttctaatgaattggtccaattgttcgatttcttgacgaatttgaatcggaagctccgatatcttggtcatcggcgtgatagctaattggttaatgaaattaatggcactctgttgagtctgttgtatctgttgttgtggtggctgttgaaattgattttgtgtttgtccaaacattcctaaaccagattgttgggattgctgttgttgatttccgaatgggcctccggtagttggtttggatccaaacaatcctccaccagttgcagagcctccgaaaccggtagtctgtggttgtgctggtttggatccaaataatcctcctccagttccagagcttccaaaaccagtggtctgtggttgtgctgacttattcccgaataagcctccgccagacccggctcctgagttaccaaataggccacctgtggagccagtggctgtattattagaacttccgaaaagtcctcctgcggtttggttcgtattgttgttggtgcctgctggattactgccaaataatcctccgccagtctgtgtcgctgtattgttattgtttccaaataaccctcctccagtgttacctgatgtggcattgttattaccaaaaagaccaccgctagtgctttgctggttgcccgtattcccaaataatcctcctcctgtgcttggtcctactggaggacctgtagaagaagaacggccaaacatttcgtttctatcagtaataagagtattagatatttacacgccgtaaattcagttaattcaacttactgttcagtatcaattggtgtctcaattctgctctctccatctttctttttaacctcatctgtttactttctcagtttccatattcaaaatgttttcaactcttccatcaaagagtataaaacaagaaaaaaaagcttgaacttatggatccgggtaacccataaacctcgtctcaaaaaattttgccaccaccaagaaaaatattccgattgaacattggaaagaattaccaaattaccttaacgattatgttactaaacagtagctttggttaatgtactttcagggtctttcatccatatcagggtatattataacaattcactaaaagtggttactcattgttcggcaacgtatactactggtactatccaatcccagttgttgttgatcttttctattgttggaggaaaaaagtcagtaaagcaaacctcagaaagtgttcaattaattacggtttgtggcttaactaaaaatgggtattccaaaattctttcatttcatctctgagagatggcctcaaatttctcaattgatcgatggatcacagattccagagttcgacaatttgtacttggatatgaattctattttgcataattgtacgcatggtgatggtagcgaggtgaattcaagactatcagaggaagaagtttattccaaaattttcagttatattgatcatcttttccatactattaaaccaaaacagacattttatatggcaatcgatggtgtggccccaagagcaaagatgaaccaacaaagagctcgtagattcagaactgccatggatgccgaaaaggctttgcagaaggccattgaaaatggtgacgagttgcctaagggagagccatttgattccaacgctattaccccaggaacagaatttatggcaaaattaaccgagaatttgaaatatttcatccatgacaagatcaccaacgataccagatggcagaacgtgaaggttattttctccgggcatgaggttcctggtgaaggtgaacataagatcatggattacatcagagcaattagagcacaagaggattacaatccaaatacaagacattgtatctacgggttagatgctgatttgatcatcctaggtttatccacccatgatcaccacttttgtttattaagagaagaagttacttttggtaaacgttcgtcttctgtgaaaactctagaaacacagaacttcttcttgttgcatttgtctatcttgagagaatatttggcattagagttcgaagaaataacagattctgtgcagtttgaatacgactttgaaagagtattagatgatttcatctttgtattatttaccatcggtaatgatttcttaccaaatttgcccgatttgcatttgaaaaaaggtgcattccctgtgctattacaaacttttaaagaagctctccaacatatggatggttacattaatgaacaaggtaagataaatttggcaagattttccatttggttgaagtacttgtccgattttgaataccttaactttgagaagaaagatattgacgttgaatggttcaatcaacaacttgaaaatatttccttggaaggtgagcgtaaacgtactaggatgggtaaaaagttgttgatgaaacaacaaaagaaattgattggcgccgtaaaaccatggttattgaaaaccgttcaacggaaggtcacttctgaattacaggatgccgatttcgaaattttccctcttgaggataaagaattggttcgggccaacctggatttcttgaaggaattcgcatttgatttgggtttaattcttgctcattctaaatcaaaagatttgtactacttcaagttggatttagactccatcaatgtgcaagaaacagatgaagagcatgaagcccgtattcacgaaacaagacgttctattaagaaatatgaacaaggtattattattgcatctgaagaagaattagaagaagagcgtgaaatttatagcgagagattcgttgagtggaaagatcaatactataaagataaattagatttttccatcaatgatactgatagtctaaaagaaatgacagaaaactatgtcggaggtttacaatgggttttatactactattatcgtggatgtccatcttggtcctggtattacagatatcattacgctcctcgtatatcagatgtgatcaaaggtatagatcagaacatagaatttcacaagggacagcctttcaagcccttccaacaattgatggccgtcttgcctgagagatcaaagaatttgattccagttgtgtacagaccactcatgtatgatgaacactctcctatcttggacttctatcctaacgaagtagagttggatctaaatggcaaaacagcagactgggaagctgtcgtcaaaatttcattcgtggatcaaaagcgtttagtagaagcaatggctccttatgatgctaagctttctccggatgaaaagaaaagaaattcgttcggaactgatctgattttcatattcaatcctcaggtagacacagtttacaaaacaccactagcggggttgtttaatgatattgaacacaatcattgtatcgaaagggaattcattccagaatcgatggaaaacgttaagttcttatttggtttgccaaagggcgctaaactcggagctagctctttggccggtttcccatccctaaagacactaccactaactgcagagcttgcttataattcttctgttgtcttcaatttcccttctaaacaacaatctatggtgttgcatattcaggacctttacaaggaaaatggcatctctctgtcagatctagcaaaaagacatatgggtaagattgtttattcaagatggccgtttctaagagaatctaaacttttgtcgttgattacagaggaaactgtgtatgaaggagttaagtcaggcaaattaacaaaggtcattgaaagaaagcctcaggattttgaaaggaaagaatttagagagttgaagatgactctcaaatcgaattatcaaaggacaaaggccattcttttggatgacatttctgctttggctaaagtggttccagtaaatggattggtgagaaactctgatggttcctattctaagtctttcaatgaaactatcgaatactatcctttacaattaatcgtagaggacgtaaaaaataaggacgaaagatatattgaaaaagagccgttaccaattaataaagaatttccaaaaggttcaaaagttgtgtttttaggtgattatgcgtatggtggggaggcgaccgttgatggttataatagtgagactagattaaaacttacagtcaaaaagggttctctcagagcagagcctaacatcggaaaagttagagcgaaattggattctcaagccttgagattctacccaacacaagtgttttcaaaaatagctcgtgtccaccctctcttcttgtcaaaaattacttcaagatatttggtcaatgattctaaaaagaaaagccataacgtcggtttgatgatcaaattcaaagcaagaaatcaaaaagttctcggttatgccagatgcagctcaaacaaatgggaatactctgacgtcgctcttggtttgttagagcagttcagatctacattccctgagttctttgcgaaactttctaactcgaaggaacaagcaattccatcgatcactgatctcttccctaacaaatctagcgcggaagctgattccattttgaaaacagtggctgattggctctcagaagcaagaaaaccattcgtggtggtgtctttggaaagtgattcgctaaccaaggcttcgatggcagctgttgaatctgaaatcataaaatacgtttctttaccagattcaagcgagcagaagaaattagctaaggtcccacgtgaggcaatcttaaatgcggaatcgtcatatgttctattgcgctcccaaaggttccacttaggtgatagggtaatgtacattcaagattcaggcaaggttccacttcacagcaaaggtactgtcgttggctacacttcaattggcaagaacgtctcaatccaagttctatttgacaatgaaataattgcaggaaacaactttggtggtaggttgcagaccagacgtggtttgggattggactcttccttcttattaaacttgtctgatagacaattggtatatcattcaaaggcatcgaagagtgctgataagaaaccaaaagcagttcctaatgataagcaagtcgccctcgcaaaaaagaagagagtggaggaactcaaaaaaaagcaagcccatgagttgttaaatcatatcaagaaggataacgcggaatcaaataccgaatctggatccgctccgcaaatagcagttaacactttaaatccttcggctgctaacaacgtgttcaatgccgtcttgaaccaaatcaaaccaggttctcaacagcaaattcaaccacctccagcaaattctctgccttacaatttcactgttcccccacatatggttcctggtggtattcctcatcctcttatgatgcagccgcctttcattccgaataatgagcatattgcttatgcagctcctcctcagtcacaacctgtacaaaatccaccattagataaagaggcatccaggaatcttaagaatctcctaattagagatgagaatggacgtacagcaaatgtggagaataaagactcagatgatacaaagagatcttctcattctcgtggcggtcgtcgtggccgtagtaatcgtggtcgtggtgcctccgggaggggtggtcatttcaaaaattctcctaaaaaaactgaaacctgaatgttggtttgaatggactattaacagtaaatattatatcacttcagtaaataatgcttagtatataagaatagagacactttcaggttcaacttttcaaaattcccggtttgttgtttgttcctttattttttgatcagcgatatcgtgactcttagcaaaccacttagtttcaaacccatttgatctatcaactccatcccatctataaccgggaacgataccgaaccgattttctggaaagtttttctcgtaaagccttcgacccaacagtgacgtattcgttcctcgcagggtgtttccttgattcaatggatcttcggttgataataatgcacttttctcagttttgcgatcaagttttgatatttgtacttcgcctatatttcgtattttaagttcttcttccttacgtactttcgctgtcaaattagccttttctcgaagtttcaattcttcttcgtatccatctattaccttacctttttcgtctctatatactgtgttctgattcttcttgagaagccctgatttttgcatagaaagtttttccttttctgcgatctgcttttccatctcttctgctgtctgtaacccagcaaaggcgcctgacgacatcctttccttactatcgtcctttttgtcgacatcaacgtgttgtacaagttccaacttttcagtttcaaggtttttccaaagagactttcctgttttatttgagcttgcagccttcttgttttcttcagtaataagattagccttgtcaataatatcaatatttcttgatgtgactcttttagactcatcgctctttctgtgtgatgacttatccttagactttttcgtcttctctttaccgtgctttgagccgtaagacttcgccaaaaaatcgttaagtgacattatattaattgggtcggtttgcaattctacccaccctaaatgctgtgataagctctacagctatgtaaacatctgagaatctgcttctgttggggagctctatagccatgttagccttaatctgaaatcaaaataaggttttcttttccagaaaaaagcataaaatatcaacaatgtaactgttagttcgataaagagctaaggtttcgcgtcaccactttgtactgtagctagtttgttagacccttactgtggacacatattgagttctcaggattctgcttggcaagaatctttactgcgatgagtcaagaatcagaggaaagcctagaggcatggctacatcgattagaatggtctcagttactttctttacaaaaacaattagtatcggaaatggatcgacggtacgtcgaaataattcagccacagggacagaatattcaagatgacttggatgaatacatgaaggacggtcttagcagctatgatgacctcccgtctactcagtttgatccaatacatgtgaagaaaaacgcgactgtgaaaagtactattgaacaagaacacgctgaaccattggcaagagaacgtaatcaaggactacaacgtgatttagagctgatgagttcccctttgaaagaaaacgagattatccttgattcccaagcgtcagacatcttgaaggagaatgatatcaacatacaacattcacatcagagtgtcatagcaaaatctaaacgtggtaggtcaccaataaatgcaactactatgccacaagctaataggaacaatgagaaggagaatattaaaaggggtaaaatctcggttgatttctccataaatccaattacgaagaaaccttggatctatgaagatttcaagatcaatgaactagtgtcctcaaaaaatcgaggaaggggatgcaagaaatccaataaagtagctcgttttcacgctcaagctggatcaccactgaaaagtaaacaaaacgttgtactaaacagtaccgggttactcgaaactgtcgacgaaactagtgtgtcagacaggtcaaaagttcccgaccttcagtttcctgacgattccttcgataatctacgtgttagatcaaaatctcctcctggatatggaaggcttaacttcccaaccacccaagaaagattggacgacaaagaggagtcgaggaaattgctttatcagaaaacaaaaacacggtttctcgaagctacgaataatttagtgcctatatctgaaagagaattttacttcaggaactccaaattgaatgacatcgttgacgatggcaatttcacttggaatgaaaacgaattgaagatattcaccagataaaaggacgtattagctagatctataacgaccatttaatattttaatgaacaatttatgtcatttcgtctaaaatcacgtgctgcgaaaaacacgttaaatgattcatgttccaaaaacatcaacaaactgaatttcatcaaagagccttacacatttcggacacctactatttcttgaagttcaacgaaacggatggatgcagaaactccctgtaattctgtaattctttgctctatctctgtgggtgctgctaaatttgcaggctataattaggataaagtaattaggttctgggtagagagaaataacattggtataggtttccatcagctttttattacaactgtccctatgagtaaagatgtatttccattgttggaactcagtgaacttgtaacatgtctccaaagttgtgacttctcccttgctgtagaggaaaatatatccaaaccaagttcacagtatgtgattacactttacaagcaaatcattgatactttcatgggggtatcgccagatactttactttcaaatgaagccctatttgataattcaggttctaatgatattcagcagaatccagcatatactgaaacggtgaaggttttggcacttaacaaaatatgttttaagtttttccaagatataggagtatcagattttaatatgatggatctatacaagccagattctctaagaacaaggaggctgttatccgctgtggtgaattatgctagattcagagaagaacggatgtttgactgtgataagtttatgtccaagaccgaattcttattgaaccagcttcgttcaaaattcgatgattataactatcttcagcaacagatcaacaaacatagaaacgaaatagagttgagagaaggtgaaacttttgaaactttacagcaacaaaataaacatcttgatcaacagatttcaaggctaaaaggattgcaggaaactttgaatatagattataacgcctacaagtccagaaaacaatcgttattgcatgatttggaaaaatttggattcgagctcatagaacttgaatttgaaaggaataaattagagaaacattctaagacagacttcaatgaactcaatttgaatattgaaaagctttctacgcttcttgctactcagcaaacgaatttgaataatttggaacagaaacatagaaagcttcgaatatctatgaatactttccagaccttgacacatgaattgtacgatgttctacagttaatatcgacagacttgcaagaatctcatttgagggaagcaaatctcatcgatatgcgtgaacagctcttgcaaacagatcaaaaactaaacaatatactatcttccggagttatggtgaagatgaagattcttcagtctcagcttgacaatcaaaagaaaaaattacatcagttagaaggagaaacaaaggcaaaacaaatcgaaaattcggaaacactacaattattgcagaggcaatacacagatgaagtggttcctgacctacgggcagccgaggagcaggttgagaatgatttggccaatggcacaattaagaattatgattacgaaatatcacagctaaagcaggcgtttcaaacggaaatcgacgctatcgatcttgagtactcgctcttatcctcgcacattaatagatacatggaagagatgctacgtgttatggtagaggttacttcttagctggtagcgtgcctctcttatagatacacatttatcatttatacaaacccacatatttagatatcagttatgacggaaaaataactgaacgtaaaaatcaccattatcttgatcccaataagtacattttctgttcaactcatctagtgcaagggagtccgaagggtcataatcattaagttctatctcatcgctgggtatttgtattccgacattttcaaacggttcaaaggcgaccactagatatttaacgtttttaggatctggtttatcaagttcaaaatctgaaactatcctaaggtaaggaatgaattcatccttctctgccgaatgtatctgctgctctttaccatatctgacctttacggctattccaaataattccttctctgggtgtctgacttttacgacctttacttcaggttttataccattcttctgtagagaagctctgaagttgtcgacctcatgttggaagtttcggtctcgtactttgtccgtattgctctttaattgtccattacgtcctcctcttttcaaaacattaagttgatgttttttaccggttagatgtctttctacgctggaccatgaaacgtgcaatgtattacagagtttgcataccaatcttcctgagtggtttttgtaaatgtctgggttggctcgcaatttggacccttcctggtcttgctgaaaagagaacggtatatcctgcccattactgagtaagtcctgcacctgttttcttctctgtaaattttgttgtgaatcagaagcaataccaccactacctttcttagaacctgctctattctgataatccatcgtcaagtatcctcagtttctcctttgctctttttatgctttcgatatactttattatgggatgagatgagaagctgattagttcggttttcatttccgtgttttcttatttactttttgaatgtttgacatgtaaatttctgaagtgtgatgagcagcagatgtaaaatgctccgacattgcagaagagcagtcctgacatcttgaaggcttaacatgaattagtatagcattatgacggatgaggttatttacatgagttactttgttatataacgatttttgcactatataacaagagagtcaagctgcaacagtattttcgggtttttttgtgatttgcaagttggcttgcaccacatcatagatagaccattttccctagttcattgtatctaatcttacgatcttttctgttatcacggttaccactaccgtaacggaaaccgacttttcctactggtttttgcacgaattttagcttagatctttcgccatctaagagttctccgtaaaccaccttctttttgtttttgtgagtgacaaatttatcatggccaatagcatgttctccttcagtggacaacttctctagagtaacagcagctggctctaattcaagaactttagccgcgtcaattggaccgaatggttgcgattcagcaatagtcaaaaacctcgatgaaagggccttagatgggataggaatttctgataaattctcattgttagccggcttgaacacagggaacatcttgaacatagtgtcagccataatcttttgttgtggtttcacacggttctgggtataacaactcatatggaaaaatgttagtaaaactaaagcttatcttaaaagcatcaaaagtagtcatcagggtcatttcactggaagttagaactcagtgtggaagagtctgtatcaattcgtatattattttcagagatagtaaacaaaatttttaaccatttttatcgtgtcttaaagactaatcgaatttttatgttggtctcatcattatgaataataaatcaaattggtactatcagctgagtcaacattatccgttggaatttcccttatttcctttttttggtgtctttggtattcttaccgggattcaaaattctatcatatacatacatgcaactccaatttcttttctaactcaaccaatttaacgatggcttcgattcttggaaccttcaatccgtaagctctggacacctcttgtgctgacattttctcaatctgcaccttttcgtatatttctaaccttgtattctcatctataataaggttagtgcggcagtggtcgttctgtgggaatggtttcaaaaggcgatctcctcttgcagaaaaaggacttcttcctgaagccggtatcacgttcttatcgttcgtatatttcaaagtagtaccactcactggatctcttagagcctgaccacgctctaaatctggagtaacgtactttggctcatggttctgaggtgatgcatagtatctgttgtaaatgtattcacctttgaaattctttggacccaagaattgtctcatggcaaactttaagttagagtcatgtctaattttcctgttcttgttgttcaacaactcaaaaggatatggtggatatgcgattgtcctccttgagacatatctcacttgttgaagtggaaattgggcaccatttcttcccagcattgtgtctgatttggataaaaccttggtaaggtaacttattcgctatgttcccggaatggtaggcctggttagatgtgcagtagctaattgatactaatctataggtgctttaaaacagaaagcagtttcagagtaggtatttccaatcccaaacatatatcgtttctcattaacgttgacaagtgaaagcttgaaagataaaaaattttcggacacagttacccgggaacgaatgttaaagtcatgtgacacaaattttgtgttcacgtgactcgttcagattaatctaggccacttggaaactaatcctcgaagttcaatgatagcctactagcacgttttaattaccttttaccgctgtaaacaccatttgtttatggcaccgagtattatctctttaactgatatcctgggcggttattggcgtttgtttttctgttttcaaaacacgtaaatatccaataaaaacgactatttaatatagactggtttcaaagatggatacgaaccacattcaagtccatgaccaacaacaggtgaaagcagtcatttgcagtacatcgaatactgttcaaggtaccgtgagaggtgtttcctgattttacttggtgctttacttccatattttttactctgatttaaagagaagggagacatggatagatccagattgtacaacaaaagtattcgcgaagcgtatgaaaatatggtgaagggagccggagctccgcacttaagcgctgatcatgataattccaaggttagcagatattctgcaagtataattcatgaggataatcggcgagaaggattggaaaatagtgagttttcagacaacgagtcattgaatgaatatgatgatgaaggggaagaaaatgatgcggatgacgatggtgaagcagagaacgattatacacaatttaagaagtcattaattcaagatgatgagtggcttgatgatgaatcggatacggactatacagaagaggccgatcagagctttttactggagaaggacaatgataatgatagtgacgatgaaagtcgtcgctacgtgtgcccaggttctgaattttattttgaggattctaaaacaagtaaatccggtaaatggtattttcacaaattctggtggcttatcataggtctggtatgtgtatggtttttggagtcttatttttctgtccatggttcatctcccttgaccccagatttgaataagaaaattaatctactacaaaatcagttgaatcaattgaaccacgaaagagatttacaaaagagcaaatatcaaagcgatttggatcaaaacataaagttaattattcaacagttcgagaaaaatgtaaagagaatattaccaaagaacataaaggatttttcactacttcattcaacaattgagaaattagagagtaaagtagatacgttaggtgaaaaagttgcatggaataatgtcaacgagacattgtcaagattaagcgaaattcttccatctgaaataccagttataatagagtcagatcattcgtcgtcggaaactaattctacaaagcaacaggttttacttattcctgagttgcatcgctacttggttgaactaataccgccgttaataaacaattcgtttgatgcacaatcaatattgaagaactctgacttcaaatatgacctaaatcattatgttaaggaaattctgaataatgagtttcaatacattgagagatcacagttcattcaagagttacagtctcatattcaggcaataaaagaggatttatcaagagaaattgaatctaaaacaagccaattacaaacaccacaacaactctcgacagtggtcctaaaaaaaatgattcatcggatctataactcgaatcagcatcaactggaagctaatttgaataaagcgactttcgctcaaggcgctaaaatcctaaaccatctatgttcgaagactgttaaaggaaccacaagtccagttgatctactacaagattgttcattcggatgttctagttccacttattggttaggtgatagcaaagggtgccaatgggcaattcgttttgacgaaccgatattcttaaccaaaatatcatatttacatggaagattttcccataacttggaggtcatggcgggtacacctaaaaaaataacaatttatgttaagccgttagtgccaatatcaaaagttgaaaacattcgtaggtggcctgtcgactcaacttacgttgaattaggacagttccactacgatttatactcaaacgctatcaagcaagatttcttattgccagactggtttattcaatcaaaagctctaataagatcaatggttttcgtggttgacgaaaatcatggcaactcatcctacactgccatgagaaagtttattgtgaatggcgttactcctaaagacttacagctaatgagctcgttcccttcggactgggctcaaatgactcctgagtattcgatatctctcgaggaacaggaacgagcacgactttccagagttgcacaatggcaagatcagcaagtgccatctttcggagaagatgaacttgttgactaagaagtaaagtattgtgaacttctaggatcataacatagggctatgtctgcagcaatggcttcgcatcttgcatttctcttgccacatagccaacatttacgggattgtctagggaattatctcaatgatgtcatctaagaacctaccatgatcacaagtccactgcccctctgaggaagcaggtgttctacattgattataaaatggaaaatgtttcagagtcatcgttaaggcgttacacttgtaagtatattctactacactcggttatatccatccattgccattgcctacaacagctttcatttcagcagtgcacaatcggctatttgagctgagccttttttttttgttgacgttttaggggaaggcattatattttttgcaaaaaaagaagtgtgagtttacatttatccagtactaataaaagaagtgaaaatatagagaattcgctctatcagtcttttaagtaagtgagtcttgtaagaactcatctttgcttcaaccttaaaactgcgagcagtaagagtttttatcaaggagttacaatggtgggcttaaagttgaaaagcgctttccaattcaagaagaaaacggatgccaaggataactcttcatcgggtaaaataagcaagctagcgtctattggaaacgacctttacccacaggactatgaagcattgcaaccccttttaactttgttgaatgtccaggctagtaagtgctatgcattcgagaacgtgtctggcgctttcgtggcaaaatttggggacaaaggtttcatacctgtaagcaagttttccttgatgggtatgaaccttactctatacatcggttcgatagatacgcacgttgcggacgaggaagttgttgatattgatctcaaaatgctatgggaccacaaagttataaaagaaggtgagaattatcatctctccttcgagccaaactgtgatatatctttagtatcttctaatttggaagatgtgaaacagttgagtaaagcgatttcgttggtgcaatttgaatatggctcattgtttaaagcgctgacggcttcaattatctctctaatgggactcaaaatttccgacattcacctaattcttaacaacaattttagttataaagactggtgctatatcaatattaacaatgaatggatcaagacgtggtgccacatagataaaagaaacaaagccaccgatgcaaagggtaagtcaaaggtaaagttctaccgtgatgataagtctacttctaaaaagaacttgatctgtttcatttctgatgtagacgttgttgaagatatattcatatctacagagcctatgaattcttcgaaatctcacacgggagtttggaatttggacgagttgagaactctaatgcatagtggtttgaactcagctgatgctttagacaccttcatggaaaagttggataccgtttctgtaataggttcggttaattggatcaatcccgactcattgtctgatagcccgcgttcttcaagatctcgttcttcctcatttgcatggacccctaagagtcctagaaagagagtcttgagtgtctctgattcgaaaagtccatcccagctaagagaaaactccgtatcgaatttgactcaatttgttggtggtaccggcagaaatcactctagaaacatgtcatcagtctcaacaaattcctcgacagccatcgatctcgacgaagccactggtgaggttaccacccaaaggttcctattcaaaccaattcctcatgcaggcgttcaccatttagaatcaataattaggtttttgattcccgtctacgattgtctacagttgtatggcaggcccactgccttcagaagtgcacgtgaggatgtaaactctctctcatttggccttccaaaactacctgctatagactatttttcggaacaagaattacaaatgatattttccaaaacagagtatgaagcggacagcatcagtaggtgggcttacttcaagacgttactccatgaatgttataagaaccgatctcaaaattcggatgagtctttcagaactttagcagacccatggaacatgcccaatgtcaagatcccactatcttccgtgacagcagagttccactactctacaaatctcaacaagtcaaacgactcacctccaatcgtatagatgtattttattcttctcatgctttcactccttgtcttatatccttgttgcatacaaccaatattttccccaagcttataaaaatgtgtataataatataatacctaggaaaccagtgtacttgttttagaaacgttccagctcggtagtgtattagtaaattgatgattatcatgtagttcaaccttttggtacacggtatcgaccagtcagacataccaataaattcaatcacgtggtttaatatcacaatacacgacaaccttatattttttcgccaccatcaacgattttagttttgatattgtatggattatggatcaagaagtatcatcaacaccgtcttagacagaatgtcagctttgtttcaacgattgaagtaagattgaagtaagataggaggctcttttggtggttcagcttttattcaattgatcagcaaagaaaccaatcagcgaatatgcaggctccagttgtgttcatgaacacatctcaagagagaactacaggacgtgaggcgcaaatcgctaatattacggcagccaaagctgttgctgatgttatccgtacatgtcttggtcctaaagccatgttgaagatgttgcttgatcctatgggaggtttagttttgaccaacgatggacatgctatattacgtgaaattgatgtggcacatccagctgctaaatctatgttggagttgtccagaactcaagacgaagaagttggtgatggtactaccactgttatcattcttgcaggtgagattttggctcagtgtgctccgtacattatcgaaaaaaatattcatcctgttgttattatccaagctttgaaacgtgcactatcagatgctttagaaatcattcagcaagttagcaagccagtcgatgttgagaacgatgttgccatgaagaaattgatccaagctgccattggaaccaaatatgttaaccactggtctgaaaagatgtgtgaattggcattgaatgcggtcaagaccgtgagaatcgatttgggtactacttcagcaggcgaaactaattatgagattgatatcaagagatacgttcgtattgaaaaaattccaggtggtgatgtactagattcgaaggttttgaaaggtgtgatgctaaataaagatgtggtgcatccaaaaatgtctcgtttaatagaaaatcctcgcgtcttgttactagattgtccattggaatacaagaaaggtgaatctcaaactaatattgaaattacaaacgaagatgactggaatagaatcctacagatcgaagaagaacaggtccgtttaatgtgtgaacaaatccttacagtaaaaccaaacgttgtcataactgaaaagggtgtgtctgatttggcacagcattatcttttgaaaggtggatgtagtgttttgagaagagtgaagaaatcggacaataacagaattgcaagggtcactggtgcaactattgttaaccgtgttgaggacttgaaagaaagtgatgtcggtaatgacgctggtgtctttagagttgaattaattggtgatgaatatttcactttcctagatgattgcaaaaatccaaaggcgtgcactattatgcttagaggagcttccaaggacatcttgaacgaaattgacagaaacttacaagatgctatggcagttgcacgtaatgttatgctatctccttcattgtcgccaggtggtggtgcgactgaaatggccttgtctgtcaagttaacggaaaaagctaaacaactagagggtattcaacaatggccatatcaagctgtagcagatgctatggaatgtattcctcgtactttgattcaaaacgccggtggaaatccgattagagttttgtcacaactaagagccaaacacgcccaaggggacttcacatatggtgtggatggtgacaatggtaagatagtggatatggtagaatacggcatctgggaaccagaagttatcaaacagcaaagtattaaaacagctatcgagagtgcatgtctattattgagggtagacgatattgttagtggtgtgagaaaacaagaataatctatcttctaccaaaaggtcattcatactaatacataacagatattacttgtacaatatttaaaacaatttcgtttaataatctcacactgggtaggcgtaataagtatatacaaatttcgaatcattttctcaaatgctcgagatccgcttcaagactaaggacgacatttctgagcttcaatgccgattctctttcaaggtacgattccatacgctccctataatggcgaagttttgaaacaagtgtgctgtcatgtgctccactatttattaataaatcaaaaagtggattccaaatatcctgctgccagtaacgtttcaaagggcttttcaactggtatctgttggacgctacttttactgtttcgatgtaatgtccgaatagcatgcaaaatatcaccccagcaagcccataataatcagcttcgtagctccatggacgttgctctctcatttcagggcaatcctgttggtcagtcttccagttagatctgaatttggttcccagtgggaataatgaaagatcgaaagatcttccaaaatcaatgagataaattccctttctattccatccattttctccatttgcaaaatacttacccaaatgagacactttctgaaatctgatcatgcaattatctggcttaatatcgccgtggataattcccacatcgtgaatacattctaaaactctcatcaactctacagttatgaacatgcagaggcactcatctaatgcacctccatttctctcgcgttcccaattaactagatctaaaattgttccctggttagcataatttaacacaagatagctttcgtcctggaagcaatgcaatgcacttacatttattatggattttagtattgcttcgtctggcactcttctttctatctgttttagtatatagaattcccatacacttgccggtttttctaccttcaaagcacttaattggcctgtgctagattctgcgagatatactgttgcatatcctccttctccaagttcccttctgatacaatacaaatcgttggttttcttgaaatcgactatcggatttttgttcatattttttgacactttctgaatccgcttcaataaagagctcattttcaactgttgcgaatattcataatatgttgggtatgatgctaaagctggatccaacgattccaataactctcttcttagctccaaacttaatggattctcaacaatctggtgtgaaggtgaggggtcaagtaatcgctgaggttgtgtaagaaaaggcgaagattccgccgtattaactgaatttgtactcttccttctagattcaccagtgatatcgtcatcttgcgacagtagggtcttgaaattgggttcagttctttcctgaattggtgtcatataatcctgtagtttacttttgaaagtgggggtagtagtttcttgcttttgatctctggaaggtgttgcattggcactggtactggcacttaagtttttactttccatcggctgtttgacttctgttaagtcttcagagtttttacctgttagatcttcttgaaagttttcatacatggtgaacttaccactagttgtatcgtcatggtcagagtaatttttcatgtcatgataactttgattgaacattgaatatacttcattcatggcatctttggagaacatagttactgtcggagactttgacttaccatcagaatgtccggttaaaccatctggttcaatgtctccttttaaaggaaggattgaagttgtagttaccttatgatactcgggagattttggttgcagacctcttttcttcatgggtttggaattctcgtgattattttcttccaaatgtcgtttgacactggaatttttttccttatagtagcagtttcttgctagtgccaaaacttcttcaatacaatactcctcatccgctgtagggtatagtaattcaaaatttgtttgtattttttctggcttccgaccaggaacttctatcagtttataaaccggcgtagcccgtccgagatcatctctgaatactggtattttatccaaatctgtttgcgaaaagctgttagattgtttcaatggcgctatcgtagatcctgatttaaaaggtatggccggcgtatgattctctttatttcgggttttatatggtggcaaggtagggaggtcctgcctcaacataaatttatcattttgcagttcttcttcattatcagcaaatacttgcaattttccagtggatttcaacgagttctgcgatctttcagacatgctattatcattattgcggctaatagaattattgcgagtatcatttatctcacttctatatcttccaaggacaagatcaccatggatttcgaatgttgaaaagcttcgcggtagttcctgctccgttagaccacgagtttgtattgcttgttggacacttagtttgaattgttcaagtcgccgcagtggccttgcttttttttctatccctcggtcaatcaaatctagtgcgtctccggatgcatccatattgatcaacaactgggagaaactttcgtaatacaatgctaatctatctccgatttcaagtctcatcatgtagacgaacatttctcttttttcatccaatttgacggcaaatagatcaatatactgtaaccacaacttcaagtatcgtacatcgtttttgtacgtttcaatattcttgcagtactctatacatctttccattatctctggtaagccagattgtcttgtggtgggagaaggatagttatcgtgaatccagttgatatactctaaaaacaattgcaatggatcatcaagttcatccaatgtatcatggatatcacgttcgaaggcgagccttgtatcatatatagaactcagagatttgttcatagcagaagtgacgcgtgtcgcagatcgtccttgaggtagcgatattatattctctttctgtgcctccaattcatcgaaatggattggacccattatcctccttccagaaatctggcacctatttatcagtgtcagtaagtctgcagttccttcacgcaacaaaatcacacttcacaggccttaatcgataatccatgcaggtcccagcttgaccatttgtttgtttgaattttggtctttgttgatatgacaaaaactcacagttgaaaatgtaaacactacgaattctttgacacttagaagattgaagaaataaagaagtggaggggaaagatggcaatattatggtgcaaagtgttatttaaggtctggcagtcatgcaaaccgttcactgaagagtgaattgtcttactgctcctttatattaaaatgattaaagtcaaattttagggtactaattaacagttatggaaaaatactaaatgagtctatatggtgtcagatgcgcacgttattcatacaagattgcagaagaaggtaaacaagatggaggccatcaagaatgcacagatcatacgaggaccgtacttatcctcgtaatcgatggagcgcttcattctgatattgacaacacgtttacagtacgtgtaggtactaaaccagatggtgaagagtgcagtcaagaagaaaccagtagaggcgaccattgtggttggcgtaccataagttaagaaacttgtggacacaccgcccaaaacaagtccgatagatatccatgaaagtaaagttctttcagtggcaaaatacacttttggttccacacgcaccggcacacatatggttttccccggtggggcatggacgtatgtatcaaagacagtaccttcgggaaccttagaaacttggtcgccgtagaggtagtgatctatttggtacactaatgtgtgccaatatttggccactggattagaagcttgtctgatattgcgcagaagagctgcggaattttcactagcggctggagaatccgctgtgttcccagcgcgagctgaatcttgagttatagaaccatagttcccagtagaggattgtccagcaggtgcggtaccggcttctccagctgcttcttcgatatcgtaggagttccctggagcagccaactcttcatcttcagtgtcctcatattcgtcttcatcatctcttccaggtcttgtgatattgatgtgagttgggatggcgggtttcctgatatcaacatccatttgaggtagccaaaatggaatagaactgactctgtcgttgagaagtgacgcgacaccgtgaatgaatttagaaaacttaggcacaggttcaactaaatgcgagcccactaattctctgacccattctggaggctcttgacccatttgagtttgtagtttgacttccaaaacagcgtaagggaatctacaaatgtctttttcaggcaactgattgaatggccaatctacaccaatatccattcttctccagttaccgttggttctgtcatgaccatcaaagttatcctcccttaccatggacaattcagtatctaaagaaatacgcacgcgggcatcaccaggcaattggaaagcagttctgttatagaaacttctggccactggtcttagtttcttcttgagcattgtatactgtgtttctgtagccaacgcctctagattctcaatttcttggattgatttcttcccctctctacgcatcttggcgaacgcttgttctacagtatacttcccatgcaagaaatcattaacgtacttttccttcaatgcgaaacgagctttgaccgatttttcaccagtccaatcttctctatgtgtctttcgttcgacgaaaattgtgtcagagctcataccaccgtaccatctcaatctatgcgcctcagcaccttcatccttcctcaaacgaccgtagtatagatcaaggtcctcgttatcgtaataaatagaggtaatggcactgtcttctttttcaaactctttgttagtgttgaaaacaagaaccggcaaatgctttaggatgatcaatttcaactctgtaatattatctggatgaacccaatactttgtagtttgtctaacgaaattttgttgtttcccaccagcagcagaatcaccctttacaggattacccctggttctaacgatatcgtaaagttgtgaaagtttcaccaccaattcatcgtaattttctttaaagaacggtttggcatccattctgacttggaaaataggtttcaagatgaaattggtattcttatcatgcttcttaataattttttgcaaaccggtgtagtttaacctggcaaacttggccaaatcatgcacatcagcaatgatatcagacaattcttcttctaagatttggaaatccaaatctgtaaccggaacatttgtatccaaagaacgcacagcgacagaaacttgttcctgggcttgcttgatacgacgcactacctcgttatgcttcactttgcaaaaagtgtacactttatccaattcaatttccaaggactccaaaaactgagtctccaaatcctcgttccattttccgttgttagcttccaaggattcctgtaactccgtcttcaagtcattgtaactgatatagtaataactgtactcacgaatcaaagatcgcttcaaatgttcaccaaattttaccatcgttatcagtatcagctatttcaaaggtcctgatgcaagtctaacccactcagaagccctgataactactttattctagggtatcccttttttcccttatactgtcacttggaaacattgaaactcatgttcctgatcttttttctcattgtatttcggtctgttatatgtgatttttttctccaagcatttaaacattatagatattgtattatggtgtataataattagaggcacgtgcgggagatgcattcgagaagcgaggtcacctgaccttcgtcaagtcttgattcgcactcttcgactatgctatacaaatggaccaagtttgttggtaattggttcactatttgtagtttttctgctttgtatagtgggaaagcatttaattcttgcattagtgttgagaattggtctgtagttaggttcagcagtgtggatttgttggcgttattgggtacggtcttgtccgacgtttctggttcttctgggtcttctgctgtagtggaacgctgtgttatgtaccttaccgtgtctctggttatcgtttgcagttctggatggtagtatggtttgttgtgtttcctgtctgattttgatccagaggtccatcggtgttgattctgtaatgatatgaggaactgcaaagtttcgtagtcgctcataaaagcgtttttttcctcaagcacgcgcattttcttggaattttgttatatgagaagctttttacttggataattcagtataggccgatacagtctttattacttgctactctttgatctcaactcagctcatctcttctctttgcatggctttcaatatattcgaagcggtgaaaaataatcccgtgtatcatgatttagatgaacgaaacaagtgctcagggtatacgtatcctgctttgtgcataccagttgcatggctgatgctggtaccatagcgattaagatgcacctattaaaattcaacgaggttagtttatattacaaaatgactatttattagagaagtagaagtgctggaatgatagcaagcaattgcggtaaattgaaagcagcagcgttttctgactgtgtggatgttaaagcagctgatgagcttgtctcgccagtggcatacgatgtgatctcttcgtcagcagcggtggtagtgaccaaagatgagaaacctgtggtcacaagttcttccgtggaagttattagagattcagttgtattcaactgagttgaagaagatgatagggaagtggaggaagatgttgtgttcaatgcagtaatactggatgatgaagcactggtagatgaagcactagttgtgttcaaggtgctttcagtggaagtagttggaattgtggtactagatttagaagtcgtagtgggggaggatgaggataaggatgaggatgatgatgatgcggatgaggatgaggatgaagatgaggatgaggaagtggatgaagatttggatgtagatggagatgcacttgtcttggttgaagatgaagatgtggaggatgaggaggatgaagatgaagtgtcgtctgatacgcttccaccagaagctaacttatcgaaatctgctactccttgatcatatctaccatacacctcaccatcattagcttcaatagattcccaagtaccatcggtgcctgagtatgagtattctgtaccagtggagtaatcaacaacgataacgtctttcaaatacatgctgaatggagctttggtataatcggtcaaaccacctgcccattcaatggttccgggctcgttttgggaatcaccaccagcccaaatacctgtgaaaatacgcattggagactctgggtatccttgaccattgtcactggtgatagtccttaccagtgcactgtcgacatagatattgatttcatccttagtccaatcaatggtataattgtggtaagaaccttgaggatcgtccaccgaatggaaagcaccacggtcaaatgtagtagtttcacccttggagaagaaattggattgaacttgagtagtatcagtaccagtccattcgatatcaatttcatcaagatcatcactttgcaaatagaatgaggaaataataccttgaccaccggcagccttggcaatcgcttgaactttaccaaacataatataaaattctgaaaccaaacttggattatccaatctcttattaatagtcatttcaacaccatcatcaccataagaaacattaccgttcgtggcatatctttcaaaatatgaagattcctcatcaaatggtacagagatggatttacccaaagcaggatctggtgaacatgtgctggcagtcaaaggattacatgctgttgattgagcgtaggcaactgacgccccaaggcccaatgcactcaaggtataggttaacttcattttcgtctgctgttacctttgggatgtgattcttgccaaattgatttgttccaagatgacgcacgtaaaaagaatgtctaaccccaatcaatattgtaatactagctcttttatatatacaagaggtgttcgcgtatttcaagttggtttcacgttgatgcccagggttcaatccgatgtatttgaacgggaaaatgaaggtcaaaaacatttgaaccaaccaaatcccacagaaacatatgtaccggtgggaaactttgaaaatttcccactatttgaatgcgctaccaaaaataaattgactgaaaaaattcgtggctttgatgcaagtctgtctgttcatcttcatgatcaccggcaacttctccatttactatatacctgccatattatttttcgttgttcttggcttgtactgtcactttggtggctttttcctactctttttgggttttctaacctttactttacccgttcgaggaataaaattagaaaaactgatgaaaaatttcgagaagacacagtacagttcctagagaatgagaaatcgtgctggttttgatgcttggttttgcaattaagaatagaaatagaaccagaaatagaaatcaacatggaagttgaaaagtgtgtcacacaaatgagctcgcatgtgtgttggtgggagggagcagcactaggtgatatatgccgtagtttttactaggtgtagtaattctgtttcaatgctgcatagaaaagaaaatatcaattctaaaaatagttcaaaattgaaattaaaaataatggttgcgaagagattcgaactcttgcatcttacgatacctgagtgttcccaactgtaaggttggttaagataggtatcttgaatcaggcgccttagaccgctcggccacacaaccaatttcgtgatagttgttatattcctctatagtatactgaaaactcaagtcatgtgcaacgtgctttaacacccagacgactactgattattttatttattggccgatagtggtgctaaaatttctatgtccacccaagcgaggcggaggcccaggtttttacttgtatgttgagaatactaaaaaaaacaatagaatcgatcttccaaatatcgttctcatttgatttcgcccaggatcgaactggggacgttctgcgtgttaagcagatgccataaccgactagaccacgaaaccgttgaaaagtttgtttgtaagataaattcaattgtaactgccacctccaggaatcgaacctgggtttcatcggccacaacgatgtgtaataacccctatactaagatggcatagtactttgcgatgtttgaatgtggaactgccctgcaccaaagtgtctgactaccctcacacatggtattcagcggcgttttctcagggcatctcctcttcctttctccctgataatattcatagacacacacacaatatcaaaccccttagatgccttcacattgctagtacttaatcataccctatcattctatcgtattaaacctgttcacacttcctaacaaaagtaccagaacttacatcgggttcattgttactttccgacggtgtgcataatttggctacgacttttattttgcatacatctacgcaccaatttgcagcaaaaagctatatgaagaaagatcaggcaggggaaagaaagcgcatcgcattctgtggcgtgggtatataataaataaataactggatcgtttttggtgaaatagatctatctcagacaagccaacattgttccgaagtattgaccaaagcagaatatatagtgattcaagagattgctacgaactatagaaggggttttaactagaaagaaagtaatgacgctaataaagatgtttgcagctagacaagccataggaagatttgcattgatacagaacagaaactttcatgctacgccgatgagatgttataaaaaatggaatgaactaaagaaggatgataagcaggagttcatcaagaatttcgttcttttgtacaaagaaaagcatccatgcagtaagagtaacgtaatgtacagggcgttggccagtgaaatggatgaatacgatgataccccatacgtatttggtgttttgtacaatgagattagggctgttgaaaaaggcgaatctactgataacgagaaaggtgtaggtgcgatgggggatgcagattttgtaaaactattgtacaagtagaattgttgagtttccgtacataaagaaagaaaggataatatattgtacatattcacaatttaatttaaatttctattcatctcggtcagtatcacgtcaattgcttgaatgcatgcattctcaactcaataccctatcaaggtcatcatttgattcaattgcatccatggcctccacaacatgtataacttcatctttactagtttctattatagatccgtcacacattatcatttcatccaatatgctgtatgccttgctaaaattgaatatgatatctaactcgcagacgttcccaaaatatctatccatagtttccacaaatctgtgtataatttctaaagtcaacaattcgttgtccgaatccaaatcaatccctgcaatgaagtataaactggcatatttcttgtacacgactttgtgatcttgatattctagaatattgcacatttttgacttcctggacagtacgttagtcgtcacttcccttagtattttatgcttgtactttatatcgaagggttgataccatctgattaacctagtcttgccttgcctcgacgtgagaagcatgtacttaatctgtgacatttcaatgaccttttttgtttataacgaataggatagcttttgtctcttaagctcggtggttgtggtatttaatgcccttgttaatcgtttatccgtagtttctcggatacaccaattgaaaagttgtagagctgaataataaccttaattttaaaacatcaactgggacagaattagacttaaactttgattctagtgacctgttattctttgtttgttttcttttgcttacatgctgattcattcgattcagttacgttattacattcatgttatattaatagttaatataacgaaaaatgagaatcaccgcagacgactttgcatgaagctgaagaagcggatacacaaaggatacatgcaatatataatttacatatccatgacctggcctaatcttcatcttctggaggtggaacccatgctggtggtttgaaatattcttgatcactggcgacatcttgcttgaatttttctctatcgtcacagaattcgagcaaatactcgatttccaattcatgggtttgcctaccgagtataactaaagaatgcaatggttcaccagaatcatattcggctagctctttgatggtacctgctttgaaggtttggcttgcagaacctagtcttgagattgctacacagggagtatcaggagtatatgcctcagtgcctcttgtttcttcaatttccaatagttgttcacaacattgtgcaatactcatgtatcttggaggctcataaatgagtcttccacgagccatattctctatactctgttccttcactttgatatctagaagaaccaaggtgtgcaacccgattttccggttttcccatatcttgtcgtaccaggaatctggtctccaactatcggtgaaaaagaccatagagatcgtttgaccaaaattgtatagttgcaacccacatgatcctactgcattcataacagacgcgttatggatgacttctactggaatattcctttgcttggcacgcaacaccaagtcagtatgagtggtggctccaaaaacgtcaccgacaaccaaaaacgcaacatcttctttatcggcatcacggagaagttcttcagctcccgattcgacaagttccctgtcagctagtgtaactttcttgccataaaattcctctagttcttctagagaagctgtcatcaatatggaagtgtagtgctccaagtacactctcgaacattgcttgatggcattcaagcctctgacggtgatatctgtttcgtaagaaagacctaatccaataaagtacaacatagctaccaaaactaccctcgttacttaaaacttcctcagttacaatttgaagcagagaccaagctaagtgcaattactccattccctcctgtcaaccatgcgatgagctagtcatctcgatccactttaattaaaattttcaacaattcgatacgttatgaagttgggacaaaaagagaaaatgaatggtatcagctcatatctaacaaaataattggatctttagattacaccacgatctctcctcttcagcacttataccagaactttgagtataccagacagtaagggcggtattcaggagacctttttaccaatcctgcgaaatgtcggaagatgcagagagacaacccttactccgagacgttaatcaaggattgaggagttccgagccctcgaaccgattccacaaatcgtccaggaatagagttactgcgggaattatagcattcattgtgctattaactactaccatatttctgggtcttatatatgttaaatctgtgcttccagatgatgtttcatttaaggagcatattggagatatcacaaatgttgaaatcaatgatatttcatttaacggatggacatacattgacgagaagcggtactacaaacttggagtaaaatcctcggtgtggttagattatgaagctggatcagccgtatcggaacgacaaaagaagcttatctcttttgccgggactaggattatgaaggaactgtgtttcgatttgaacagtttagacactttcaagcaagaaaacgacaccgacgtcgtttcattgggaaaaattattatacccaacactacatgtattaacattcagcaaaatagtaccactgacttggatctgttagtattagtgaagcccaacacagagcagttgattccaattttgaaacaaatttgggagaagaagtacgatggacttaacttatggagtagtatggatctgaagttgaaaaagagagttttctcacacgaaattgttttattgagtataaacaaagcaaagttgtattggagagatttcggtttatggaaaagtgtgattgatacacttaggcatctctcagccgaaatttatgacacaattgaaagaattgaaataaacaatataaacttgaaggaaatagaagatggatatgatatttcctgttctatcggagttccaaaccctctaagcagtacctgcaataaattaggccccggactcctaatatctcctggcatgcaatggcaaacaactttcccaggatgtcgtaatgaaaatgggattaagcttgataatgtagttgtgcacagccctgagttgacctcagagtcagtatccaaaccattcatcaatataaccttagatagtacactgataggtgagctaccaaacgaatttcttaatcatgtatgcgcatcagatgattctaacgttataacaccactgtcaaaattgatcaaacaactactcgatcccaaatacctcattaatttagaagttacttgcactgctgtggatagcaaaaattatccaaatactttacttgaagattatactgccttacttccatacctttttacaccgctttcggtaaactatacagttgatgtgaacaatatagtccaagaagtaggtactagaggtatcaagctacaatggtccactgatctacttggtcggaaaaggctgaatgtcaagggtaagattgtagctaaagttcaaataccgttttaccagttgaaacaagatacgacattctcgatgcaaagaattaaaggacgaacaaaattgtatcacaatgatgttcatatgctaactgtaccattggattcctggacgaaatgtatcagcaatgttgtgatcgatgaggataagcctgaaaaatcgtacttcgatgtctcatttgacatagataacgaccaagttattatagcagatactctagcactcactcattgcataaacgaagtagtgtttaaaggggaatcaacaatttttttgaaggggaaacttgatttgatggtcgcaacaagtattggagatattgttctattagctcttccaggtgagggctcagcagtcgttcgaccatagcacaattatatatcattttgccagttgttctacgaattgatggctatatttttattttattatatattctcgtgctagaaacgtacgtaccggaaagaaagtttatgattacatgagaaatcatacacgatgaccagtttcctgccgtgttcctgattacttttcatgcaagaataagaaagagacttggctatggttcgttgatcttcatttgtctgtctttctttatcttatcagtgattaaaaatgaaaaataaaaacaaaaagctcgaaaaagggaatcttgcatgtacttctccaagtattaaacagagtagtaagaagaaactggatattgagacaatgaagagctgttgttcctccaaaggattgagacctctgtttgggtattgaatgcacaaagcgtaacacgaacgctctccctaagtaaaaactggtaaggaaacacagaagacctgatggataagaagaacggtaaatcatgcttggtatgtagaaggcgcaaagtaaggtgtgatagagcaaaacctgtgtgcctggtctgtgtaaagcatggatcaaacatggaatgtaattatgaagtgcaaaaacgggaggtaaagtttgtttctatgaaaacgcccgatgtctccaaccctagaatgaagaaacagaaatcattcaagtattccatacctttctccggaagcacaacggtggtaaaggagctcgacgtattgaaacaaagaatacattcgttagaatcccttctgagcaaacgtaatgtttcatcgacaagtgataacatgaattattcaccatatgtgaaaattgaacgaaatgctcattttggcagcaacaatgtcgtacccttggatttgagcaattatgaggatttcaacttttaccataacttggaaacagttgatgtgaaaggcggccgtttatcattcaccggtgctttgaattacatttccatttcaaaagtggatccatatttaatgactataaccaccttggtacgaaaggcccataatgataggagtaaccaatttataaggcgggtacagaaccgcaagtattcaaatcttgaatatattccagcacttgcaaaagaagttttcgtggcgaacagaaatgaaactgatacggccgtaaatttattggttgaaatatacaacgatgagtgctcaactagcaacataacagaaaaagacgacagtgctaatgtaacagatgatgaaaacaatgatgtagaaggagtaagagacactgttaaagactctacttcggagtttgaggttggtaatcaagcacaaagagcaaaatttgctcgaaagtaccttgaagatgagaatttggatggcattttaacaaacgagaaaggatcaaacagaccttctctagcagaaattatcaatacaagtgctataattaagtcaaacgaagattccccaaagtcaagaacaagttctggatccaaaatctcaaaaaatcacaatggctactttgaggcaactcaatgcgataacaacgtaaggcaaacaagagagcagtcgctgactgataaaacacaatcgaaaagcgagaacacccctgcctctcttgacgaagaaacagaaattttgaactatataaggatgctactacctcccgcgaagctcatatggatacatctcgataattatttcagctctcctttacatgcattgtatccattctcaacggaggattggttcaaggatatgatagcgggaattctcggaggtcgttccgagtcagagaaacccccacctttgaaaatagaaaagaaattggactttgcaaagcttgcaacgtttttcgtcattatgcgcctatcctacttgatgttcccagcagatttagaacattgctctaccgaagaagaaaaatatgttgttagtcatgagattggaactgtttatattgatgtcgccaatttatgcatgcgtatgtttaacctttggagaagaggtgtgttgccagtccttcattgtttgctattgttgagagtgtatcgcagatatgcacctgaagagggagatattgcggatggtgctgactctagcacatttacaggttcattagttcagattgctcaatctcttggaataaatacagatgctgaagcatcgtaccagctaaccaattttgagatttatttacattcttggagaaaggcctggtacactatatatttcatggatgtttctgaggcaatgaatatggggaattgcttcactattgacgtagaccaattcaacaccaaacttcctcatatcaaacgagaagaagatgggagcatcccggaatttttcctaaatcctacccatgaggtggccagtgttgactgctataggaaaaactttgaattttctttacatgtgaggaaacttttaaaggttgtcatgaacaaaagaaacagatccccttgcaataccataatggatagaattgcaaaagtggagaataacttgaagataaactattccgaggatttgtcatatatgatttcttcgggcgtggaaggttcacagctatgcattgaaaaatgcaataactttcgcatgtatgtgaatacacaatcgatgttgcttataataaagctacgactgttcattcatctggatagtcatcatgctgaactaaaggtgaataatttccacgaacctttccaattgctcaaaatgtgtctttctctttacgtcgagcttgagccgctgttgattcttttgcattttcacaatcaaaatgatgagaatgatatttcctacattgaaaagatctttggaccgaaatctaagataataatattacaggcatgtaatcacatatttgttaggtgccaaaccgtattgcatatattgctttccagacttattcatctttaccatggatatctcaaaaacccggatcctgtatatggaagttctaagcacttctttcaaataaaagaactagtgaccaaaattatagaaaatgctttggataaattacatttcgccaatagtgtaacgcaatctttgagtggaagacaatttcaagcttggagactctccaagggtaatcgattcctctactcacttttcaaagatgaaaagaataatatattcgatccacactcccctataaacaccgcgttccaaaatttgggcatacaaagagataacttgggcgttccattattaattgataatttaaatccagccaagaaattgccaaagtataataacttcttgctgctggatctttcacagtttgaagaactctattctatcatgaactctactagatggtctatcttctctggcatattcaatgaagacaaactaaaagaagctttgaactttcgcattagcgagcacaaacaatcaatctcgaccaaaacagaaaaacggagaaaacggagtagctcaacgtcaaaccccacgccggctccaccatgtaaagaggttctagattcagtgagtttatctagtaagtcatcagacggtaatgatgggactgggctcaacttgccccagttgaaagtcaatgaggttgacactcactggtttaatgcgattcttcgaaacaacaacacacattcgagctggaaccgcgatgattttgataatcatgctgttccacctggctcaattacgacacaatcgccgcttgtaatagaggccgatggcttactctctgatttggcaaaggctccaaatatcagcctagatgagatgtttttgaacccatctttccaacaagagagtcttattcagcagttgcaaaacttatcagaaagacaaaatagtggcatgatgttgcccaattctaccaacaatttgggtggctcgataaccggggcaccgttctctaatgatcatttaaaaaatccaccaaaaacgaacttcaattctataatcgattctacggacttagattatttactttttaacggagatatataaagaagctttaatatgctaggcaatattgcaatttttcagaattatgaaatttaacatctcccgcctgttggtgcatcaaggagtgtgctgttcctcgtctgggctatagtgtcttatgtcatcgatacaataaatggcgacttttttatagtagctgaagtctgatcttatttgtcgaagtttagctctaaagaattttttgaaagttatcttactgtcaataggtggtaacaagagctctcgaaggttatcattttgagttttaatcgctttactgggttcaagagtcttttctgctttttcccttttgaagaagcaacgtaaacgctgtaattgttgggttaatgaaatactgtccagagatgatggcgtggtcccaggtttatttatttctatcttgataatacaatcagcttcatgcacgtcaccaaattttggcacataagtgaggtgtctcaacccagtacacagatccatatcaatcatagctgtttcatggatatgtaagtttttcaaagaagttggattctcaagaccagtaaccatgccattctgaaatgctaaagcagttcttattgactcggagtcttcggactccatcgaatagttttctttccccatattgatatctgccacggtacttcgaacagaatctttacccaaaatcttatcatcaatagcatggttattggaaaaatttttgttctttgtagacttcaaatatagatgacacatatcaacatctgtttttggtgtcaagggttccaagtcatcctcaaagattttttgacgctcaatttgtctttgttttatctcctctaattccaacgacgtttggcttgtttcctcctccatttgccacaaactgtaaacgtttgttccttctagccacttcatatccactttaacgtaacgagggctgatatcttccgggttaatatccttgtacaatttggctctttccttcaacatcatctttgagaaggaaatagatactttagagtttaaagtatgttcttcagtaacctttgttaaaaattgcgttgggaacttccaagggatcttgatcaccgattgcttcccagtatcgaagagttccggaaaagtttccctcttatcagttaaagaattcattttctgtttacttgcagtacagtgttgaataaaatccttaacatgatataatgtcccacactttagaaaaagattcgcagtgtatagttccaaagcatatttcgttaacggatcttcataattgtgatccatttcaccgttcaaattataaagatcatcaaatttcaaaggttcaatacgaatgtctgcccaaagaagctgtttctcttcaaagatctcaccagtatgattttcaagctgttgattggaaaactgtaaacacaaaataaatttgaacaaacttaattgctgcaaagtttcgacgggactatcccatactggctcaggtagttcaatcattttatcaatacaccattgcttcaactgtcgtccttgtaaactttcaatttccaaaagatgaagaataacttcaccgaaataacgattcaaatcggagtcattacttttctcaccgtagcaaacaagcatagaactcatcctgctttaaatatccaatgagaatagcacaacctgggggtaagcagtattttactgaatacaccaacgtttcatcaagcctcgattgttaaggtaatgtggactaacttatcataatcaaacataaaaaaagacacgctacatatacgcaaagaaagaccagaagataagtttagttcgaaacaaacatgtaatcaagtatacattgaaatcaacattttgtgtcagttttatgctgaaaggaaatgtattccgtccatctttgacaagaaatactgaaatttacacactgacgtgcgtcagctgagcggaaaattgggcgagaaaaaaaaaagactttttttcgccgattaggaagaagaaagaagaatcggagcacgtgaccactgtcattttcaacatggttgggcatgccagaactctccccttatcgatgcatctcgcggtgatacaagcccatttgatatccgtaataaaataaatgatagcaacaatagcagcagtagcagcaacgcaagacattggttttgcaattttctagggaaattgcaaaaaaaaataagaagaggctgtatacaatgcagatagttttataaaaagagatgagctgaaatggctgcggaattgcagaagttattgacttgcaggaagttggagactcgtttttagatttgaaataggaatttgatggggtggcgataaagttgttacaccagctattatacgactttaatactgtgttttcgcgaagatgaacggatttgttaattggtatactgcatctgtgaagagatctcccaggttgaccaatgggataatgactggttcattatttgggatcggtgatgtgattgcacaagttgggttccccgaaaaaaagggtcagaagtacgatcttgcaagaacggttcgggccgttgtatacggttctttgattttctcaataatcggtgattcgtggtacaaattcttgaaccagaaagttatagtgaaaccggggaaacattggaccaacactgccgcaagggtcggatgcgaccaacttctctttgccccggttggtattccaatgtactacggtgtcatgtcaatactcgagggtaaatcgctagttgatgcaaagaaaaagatagaagacaattggtggcccactttggtcacaaactggtatgtttggcctgcgttccaactaattaacttttcattggtaccagtgcatcataggctcttctccgtcaatataatatccatattttggaatgctttcctatctttcaagaattctatttctccaagtgacaagaaagtacctgtgaacttcccaccggttcctgaatagatgaagatgaatatatacatatagacaaaaatgtatttcgaaaaagaactatttatcgtcaaagcctaacgcttgcagcatcagtttaaagctcgggggtttcaacagttctgttgatcatttgttatgtcaccaaagttatcaccgttagcattcaaaattcctctatgcttaggaaactgaatttttcacagggtttttgtttgttatatatggttggtaagatttgtcaaaaacgctaccaaactctacatattcatgtaagaaccgagtctaaagagcatccggcttgcatatgttgaccaatgcttactagaaatattgtgcggacgcgacctttctcgagccacctttttataaggactttgaggcaacagaggttcttttctgacacaacttcggttccgaaaaagaggttaataaattggaaatatgttgcattcggtttggcaggtactggtgtggctttctataacactaacgatactttccatgatttcactaggcacatatacttgactttgggccgtgttggtgttgttactcgggcaacggctcgctgtttctatcattacaaaaagacccttgacgggaaatatcaaaatgatgcggagtatcaaacagcgttgaagaactgccataagagatgtgcagatattactcttaaagcacttgaacgtaatggtggagtgttcatcaagttgggtcaacatattggggctatgacgtacttgctaccgcccgaatggaccgatacgatgattccattgcaggataaatgtccggaatctaccgttcaagaaatagatcaaatgtttcagcaagatctcaaatgtactttggatgaagtgttctctgaatttgatccaagacctattggtgtagcgtcgttggctcaagttcatgttgctaaactaaagtctactggcgaaaaagtagcagtcaagtgccagcaccctcagttgaaggaatttgttccattagatgtgatgcttacccaaacagtttttaatctgttggacgtggtgttcccagaatacccattaacatggctaggggatgaattacagtcttcgatttatattgagctagattttacaaaagaagctgaaaacgccaagaaatccgcagaagattttatcagctgtgtaaacaaaacagcattaagaattcctaaagttgtaagtgctaataagagaatattgatattggaatatctacacggagaaaggttggataatatcaaatacatggacgaacatcacatctcaagatcagaggtctcttcatgtctatctcatatcttcaataggatgattttcactccaaacgttggcattcactgtgatccacatggaggaaacttggccatcagggcgctagaaaagccatataagggtcataatttcgaaatcattctatatgaccacgggttatacagaacacctactacggagatgagacgagactatgccaaattttggttagcgctccttgatcaagaccaagagaaattacattattatgcgaaacagtttgcccatgtcaatgacgagcaggttcccctatttgcagctgcaattactggccgtagtattgataccgcgttgaattacgatatctctaaaccaagatctcaggaggaaatggcagttatgtcttcaaaaataactgaaggagacttgttggttgatttgatgagtattctttcgaaaatacccagtgttgtactattaatcttgaaaacaaatgatctcactcgacacttagacgaatgtctccacaatccattgggccctgaacgaacattcttaattatgagccagtattgctctaagatcgtttatgatgaagctcgtgagacgattaatggatcatattcaagatggtctgtgaaatggatattttgcgaactaaaagcctggttggaattccaacgtcgtaagaaccaattagtcttgtatgatttagctttatggtggaagaacaaattttaaaaatcagttgctgtatatagtttctgaataacttcagtattaaactttttacataccacggtgttctcgaattgatgagactacctcatcaactaacagataccagttttattttaatgatgatcctcgataatttttttggctgtaacgatatccattatagccaatccaacaatttttgacaaagttatagatctggatcccaccagtacttctgtcttaacggaactcactgattcaagttgaccgatttcgatcaactgagagggttcaacttttgcagtgatcaattcaccagcttctaacaaggtgtgttccttggaatcaacgataattttggcatcttccttttggaacaatgataccagttcagtgtcgcattcatgcatatgaggctggtaactaccaatcaacccaatgtaagtgaaaggaatatctgagctttcctggaagaattttttaaagatactaggtgatgaagtggggacagtgccgaagataacgtgactgctgttacaaatcccagctacttcttcactgtcgcttttcacatagttaatattcttaacattattacacgaaccaagcaaatctgcttcatccaataggctagatctgtaaactacgtttaattcaatttccttttcagaaaagagcttagaacacacgaaagaatgccagaacgcttgcaagccggtcccaaacacggtgacattcaacttcgcaatattatcaaatttgtgtttcactttgtacaaaccgatatgagaactcaatgcagttctgataccagtgacctgttttgcatcgacaacaccttggatcaaccctgtagttggttctagtacgttgattgcaccgacaaagcctactctcgaattagcgttataacccaaagtcttcacaccacaataaacgtcatcaacaacaggcatgaacatgtgcatagtgtcccctcgaggggtaaaaaccttggttctagggggaacaattgttggattttcagaatatctggtcagtccatcctgtaatgcttgaaggtgggatataacttctgcccgagaaaggttaagaaaatgagtcttcacttgagggtccagtaaagtcttcaaactcattagtgaaattggctctaaggttcttgagaaacttcgtttctagatcaatggcttacgcacctgaaagaaagcaatactgtaaaacggtttctatcaatcattgtacgctctttttaaagaattggtcgaaaccagggttttggctgcctaattttgatgtctcaaattactcgacggctaatgataagaaaacctaaaaggatgcataaccttgaacaggaaggtaaagagggtattaagccctgcgattctattttgacatttcacacaccagaccgaaggaactactggatatacttgattaaaatgctctgctcggctggcctgtctctttgtatgttcagtttgattcactcctttcttttctttttcctgctgacaacttccatcacgtgaccatcgtatagcgcactcaagaattatgatggggaccttcgtagcgaactctcagtctgttggaataaaatcagtgaaagagaatactggaatacaatcgttgtaggaaattactaatcattcaatattaacgtcttttatccaaatgcaccctgctgagtgccgtcagtaaactctgcactctctcatttggcagtttcttttcacaacatctgtccaaaagcctcgcaggaaaactacacaactcacactcgcctagctttatccaccttaccattccccttaaaacccccacccgctaaacgacgagagaatatcgctaatgcccctcgatgttgtagcttatgttatggcttctaaaaactgtcatctgccattgcatactctttcctttttcttgcgggcttcccaccttctatactgtccaacatcgaaaaagtgagaatgagagaacctttaaaataaatacgaaagagacggactgagatgaatcaggtgttgttattaaaagaagagataatttagtgtacagctcaacagaaagccgtaattctggaataatttacaatttatcgactggaagtacatatatttaccgaatttaactttctttctttcatggttgttgagagagactgtttaagtgattagttttcaatctattcctttacattcattcttgatagcgaaagggcaataggaaaaaagagatcggaccttgagtttgagataccaagtgacgcgttacagtgataagaagttcacgtatatttcgtcaatttttttaactagtttattatcacacacacagtgatagatatacaaaggttagaggtggatattttttgaactatgagctctattacctcacctggaacaggcaccccgcagcagaagcggaagagaaacagagtacccctgagctgtacaatatgtcgaaagaggaaagttaagtgtgacaaaggacggcctcagtgccagcaatgtgtcaagactggtgttggtcatctatgccattatatggaacagacgtgggctgaagaagccgagaaagagctgtcgaaggattcggagttgaagcagcttagagaacgtgtgaagtctttggaagaaactctttcaaaagttcatgccactacgacgaatcctatgaccagtgctaaccagagtccagcgtcagatggtttgaatgtcggttgtcctcatgcaggtggcagtactcaacggctgttatccggatccaatggaaattcacctattctaagtacggaacaaacgccatccaatgagaataagtatgataacgatgagttggatttgacaagacagttcgatatgttacatttgaaaaataatggtactgtgcatcttggagctacccattggttggcaataatgaaaggtgatccttacttaaaacttctctggggtcatatcttcacattaagagagaagctcacggaatggtattctcagaaacggaaatctagtaccgtctccgctggtgcaggtacatgtcccgtcattcatggctcaatacaacaatccaaatgtccagttgcacatgcaactaggaacgttgcagagagaccgaagagctctgagtcacgttgccctgtagcacatgctcctaggcccgagaaaaactccacacaaaaatgccctgttgaccatagtgctttcatcggttctgctagctcgggtcaatgccccgtggcacataccgttgtcaaggaagaagttgacgcaactacttctggatgtccaatagaccacacaaagttttcctctatggaaggttctcctgatcctgcagctaagggaaagcttccggctttgccgtctttccaaaatttgacagcgaaatgtccaatgcttcgcgagggaactccaaccccaacgttgaacagccaggaatctgggcataattcgaaacgcactagtgtagtgccggagatgtcatcagagcaggccactgatgccataagcaaggccttgccaccaaaaaaaatcgtattccttttcatggataaattctttaatcacatttacccaatcgtacctatacttgatgagcagaccttcaaactacaggtaaatcaaattttgcaaacaaataataaccaaacaactgtcaaattgacgaagccgttagatgcttgtgttttggggatattattgattattttgagaataacatggctttccttgactcccaacgcatgcaatatcaagttaggaccagagtgcgaatcgttaaaattagaacctacatactccgctactatcacacaggctaaagaggaagccatgctattaaaatacgaaacacctattgaaacagtggagattgtaaggaaatttttgatcaagtttgatgaaatcagtagtttcgcaaactccaatgttaacatcaccacagttcaatttgccattttctacaaattgtatctcatgtcctctccggataagacggattatacacaacccaacacatttacctcaacgggtcaagataatgagacccaccaagttcttatgtccagtattgtgcaaatggctttcagctgtggattgcaccgtgatcctgataatttccctcaactaaacacagcagtcaatggttccaagttgacgaaagaagctttgtcgaataccgagagattgaaacatacatggaggaaaacctggttctttattgtctcacttgatgttcaacagtctctatcactaggtacacccagattattacgtaatctaaatgacttcagtgacactaaacttccctgtgcatcgaagatcgattatgtgaacaatatcaaggaactcatcctggtcaagaatttcaaattgttcttccaaattgacttatgtatcatctctgttttgaatcatattttgaatgtttctcttgcaaggacagttagaaaatttgagcttgaccaactaatacaaagcttaggtaaactacgtgatggtgttactccgacgaatgatgttgtcaatgatcttgttaataaaggcctattatttaccacagaaggaactgtgcttttggaccaaaacccagagcattcctattcgttaccatccttaacatccgttctttcaacagtagataaaagctcttcagaagaaaaggaaaagaaactcagtctcgcccacgaatccaccacaagagctttgtttttctcaaaacatgtcacaattagcatgctacaatatttgttaaactacatcttattcacgcattacgaaccgttaggtaacgaagaccccggcacaagaattttagctaaagattatgcacaagaagccctcaactatgcagtggaaggcttcaaaaactgcatactcttctataacagcaccggtatgaacaacatgttcagttatatggatgtgcttttgtcgcccacctgcttggacgtcggacatcgtgctttacagtttatcgtttgcctaattttgcgggctaaatgtggccctttaacaggtatgggtgaatccccagctataggtaaccaaaataacactgttactagcagcagcgaagatgaaacagaccaaatgaagagagattcatccccatctccaggaaacgtccttacagatgtcagtctggatgcaggtgaaaacttagccgaagttctcctcgcaagaatgatcttatttcacaagttgacaaaacaaatctctgccaaatataactatgccgtaagaatgacgaaatccacaggtttctttatcactttacttaagaaaccttcctcgaaatccaaaactaactctaaaaacaaaaacctaccacgtttgcatcaacatccaaatattgcaaatatgacgagtttcttcaaaaacgttccatcattggtactttcagcaggaggggatcaaattagacgttgcccggtttatcaggacgcagttgggtttttgccttcgaaagtaacaagcggaaccttcaactcgatttttcactccactgctcctccttctttcaactctgccgttacacaacaattgcccccactgaatatacagtatcaaccaatcacttttagggacactttaagacgcacatcagatgtgagaggtactcctgaaactgcgaaaagaaggaaagtagacaccacatctaaaaacttctctgagcaaaaagttgaagtaaaggtggaaaatcctcaaatatctttaccaccttctccagcgcagatttctgcggtaactccctttgagcctttgcttccaactttggacaaagtgcctgcagttccacaaggaaaggttccatatagcccaacaccaagtttgtctggaacacagcctcctattgttgcaccttctaacttacagcaattaaatttcaactctccagtacccccatcagatttatctaacatcactgattcccctgactttgaggacttcctatccgaacacacatcacttaatggattaatgataaacccgtcatccatagtggaagctgttggatttgatggttattctgggaatggtgggcttcgcttacaagccgatttcttaccgatagataataatgatggcttgaacgaaatggcacccatcacagaattttcgatgtgggaatgagttcattgttacttagatcgttttatttcaaacaaatcaaagggcgtattacaaaagcattttcaaaattaacatcacttctttctaattgtggtagttacgtgccacttatagtttgccttgtcactatccggatagacgtcaaattctttttttctgttctgcttttcagagttcattaattaatggactcatattaatatcgactgtaaataccttaattaaatcatgataaattgttaataactgcaactgcatagcaattcagagcatcagtatagcatcgttagaaatcttccactttcatgaactctgattaaagaaagcctgcttcttttctatacgtatatattaccttatatattaccttatatattacctccgctttcacttacacatcattttcatgcatgctaatatttaagttaatctgagaccgacaactattatcaacgggatgcgagtgggaaaataagaaaaaaagataagaaaaggaagttaagaacgtcagaaatgcagccacttaaccttaaatagagaaatcggatatttcaagagatgactatatataaggttatctgtatcgaagccagaagggttcatcagtccttccagaatgttcgtgtttgtgcaaattgtttgcatgaaccaccagcgacttctgtcgaatataaatgtcattcaacgccagtagaagatccgtcgtatactctacccaaggtgttgttgcgtcaacacagcccttagcaagtgcagccggaataagaattctcgaacttggtggaaattctgttgatgcgagtattgccgttgcatctgtacttgccgtggtagaacctgcatctaccggagtaggtggtgactgttttatgttgcattacgatgagagtaagaaaaaggttgtagggttgaatggtactggtaggtcaccaaaggcactagatattgatcacattcgaagtttgggaattgaagatgttaggattccattaacctccattcatagtgtcactgtacctggtaccatagcaggatggattgatgctattgaaaaatatggcagcggaagagtaggattagatgcaattcttgccccggcgatcaagctttgcaaagaaggacatataattagtgaaatcagtgcttatttgaccggaaaatgttgggaagacctcgaaaggctcaacggcaatgatctattaaaatactgggccccgattgatgcgcccctcgaaccccctaacaccggtagccttgtgcaaaacaggaagctagcagagctcttgcaattggtagcagacaatgggaaagatggattttacaaaggtgtagttgctgaatctataatagaagaaatgaaaacacgcggtggtttaatggatatggatgatttggctgctcataagagtgatttcgttgacccaatatatttggatttcctggagcataaaatttgggaaatacctccaaactctcaagggctcgtagttttacttgcattaggaataataagagagcttgacaaccagaaattgattaatctgcactcaatgcaaagaaattctgtggagtatttacacatgctcattgaatgcctcaagttagccttttatgattcagacgaatatgtgtctgaccctaattgtcaggaagccgacatcctacatcgattactctcaaaggactatttaaagagtcgtgcaaagctattcagccccagtggtatcattgactcttctgttatcaaacatggagttccgaacgaagatttcaatcagtcggacacagtatattttaccgtaagtgacccatatgggaatgtgacatcgttcataaactctttgtatgatggttttggttcttgtattgtgccacgaactttcggaggatttgctctacagaatcgtggggccaactttaaccttacaccaggcactaagaactcattagagcctagtaaaagaccctatcatactattattccttccatcattaccagtaacgatgaatctaccgtttatggaatgggaaatatgggtggtttcatgcaacctagcggccatgtacaacattttttaaatttaattctctttgggttgaatccacaggagtcactggatagcccaagatgttgtctgtctccacatccaaagtattctcatctagaccgaggcagaggatcatccggacctgtcaacactcctgtgtctctcattcagttagaggaagatataccggaagatgtatttgatggtttagttaaactcggtcatgaagtggaatatgtaagaggtttgtccagatcaatatttggacgtggtcagattatcaaaagaactaaaaacaacgagaccaatacctggctatacgcagctggaagtgataaaagaggtgacggggcagctgtacctctgatttaagttacaaatcgggttattttattcataaataggaagaccataaatagttttacaaacctggtagattcaatctatatgtcgtaaaattctttaacaaaattacagtagttctgttttgcatatctttctccatcagttagcaaggattcaggtccacagcaaactagccagctgttttgaagtgcgtgcgactcaatgaactgagctaaatccacctgccagtccaaccttctcccgaaatgcacaagcgatggtgatttcgaatcgttggtcagcaaagcaccggactcatccattgtctccaattcaaagtcgatatcatcaaattcagaactaccattagcattcatagatttagtttgagtatcatctggcggtaagcttcttgtgacatatacttccaagtcattggtttcaaagttacaatggttcaaaatatgcatatcttccctttctctaatcaaccagatgaatttgagatagtctaaattcctggtttgcaggtatttaaatatgctcaacccgaatgaaattccacttcctccaacaacgatagctacacgctgagaatcatacaataatgatggtggaacagtactgtacacatccacaaccgtatattcacctacgacaacgtatggagtgaggttctctctgataataaggtctatttggctctcatctggaagtgaagctatagtgtagggttgagtgggcatcaaccagtacaatggattctttttcttatatttcgaaagacgcagatgggagcctggaagccaatccctaatagcacttctatcaagtttcacgtaggtaagagatgtgtcatcctttaccctctgggtcacattaacagtagttgagtagtagatgtaacttatccccctccaaatgtacaatgccaataagataaagaaatagggaactgtcactcttggtctagcatgaattgggaccaaaaataccatagcccactggcctaattgatgaatgacataaaatgatctataactataacgtctccatattctaacggaagcaaacattaggatgaatagtggaacaaatgcaataactccaataaaattgaatagtttagttgccttggatatcatcgacactttggggtcaagagaccacttaacaatgaaaccaataccatgaataatgcctataacggtaacaaatctagagagccatttatgcaatggaatcaaatccaagtaatggtagcctaaaattgggttcgctggcctcaaagtcaacaacacgttcaatatcactaacacgtatgataatcttcctaatctttttaggtaaagagagatgtacgcaaccaatgaatatttatgtatgaagggaacaaaaaccaatagcaaaagaagtggcatatgaaaacatggtgaagcagtccttatgctctgtaatagcttatttttccatggtgataccttggtatatctggatggtatcagccatctcatgacaataagaaatatggtgtagaatactatgacgccaagcacgtaatatccatacggtaaattggcataatgggtagagctacctctcttaacaagagaagatgcatccatcttgaatgattccccccaggttacttacgttttggctagtttacgctgaggtgagccttttcaggaattcatgtgtaagctataaagagtacaagatctcgagaacactctccatttcgtcattttttttggccttgaagtgcgagagagtatttgagaaatatataaaaacctaaatgactttgcctcgcaggtaatttgctcgagtagcaaccgttacttcgaacatcggcacaactacttagatcgtgcgtatactggaattcgcttttgcaggaacggccgatagagccaaaaaaatttctgttcaaaatctgactttaaccagagaagtcatccagaacatgtacggaataattctttctcagatgtaggaaccgcatgaacgtaagaatgccgtaatcttgtcaaaacgctatgtggaacaatgtttgactagaacaacatcctaataatcccctctcaataaccttcacttttgactattttgtgtttatagtgtaacaatttcagcttcaactatatctagttcaattaaactttgcttcatgtgatatttattagctcattaaggttgatgaaatttacattaacacatcaaaaactactaagcatcggtggtttagtggtaaaatccaacgttgccatcgttgggccccgggttcgattcccggccgatgcattctttttatcccccctttctcttgataacttgtaaattgtcgtaaaccattcaaagcaagttgagccgcgctaggagcactttaagcattccggcactgctacgttacacatatttccacaaatgcaatttattccaatctcactctttctacatcgtttatctaaaattaaacatactatattgtaaacaaaggaatttccggtgcgatacttgtagataatggactgtatacaaaagtgttttgaacggggccttttctgaaccaaaaatccatatcttatctaagcaaaagaataaacaagcttgtttgtatgtgagcatatcaagaaacattatctgatctccgacgcgcacatatacacatgtggtgtatgataaccgactataatcctataaatcctttatcctttcttccctgttatgatctcctgatagaacttaaatgctctctgtccggtggctactagcaatcttaaacgggactgaagattaaataggcatattacccggaaaactctattagggtaaaatttagtaggttttcatcgattgcctcatatttcaagaaagtgggacttttgttccaataagtcatactggctatatatatatacgtcttcactatattgtaaattcttcattggtgtcgttgataaagtacaattgatctggaatatatcttctgagatcagtaaatctctgcagtcatttccgtttttttaacgaattatctcgcaaatattagaccatccttttaaatcagggattatgagcgaacaaccgagtttagtgggtcattctgtccgtgatattgatgatagtgagaatccggacttcgttccagaaaaaatgcctgatttcagccaactgaatgaatctgtgaggagattgaatttgaaaaactcttctcctgacgatagtgaccaatacacttctgttgcagaattgaataaggaaggcgcacttttgaccgatgatcaggatgtagatttagatgacataattgccaaaggattggatgacattagtgaattgaaatcatctttggagaataagaaaaagattaagaacaaaaaaaagacaaagaagtcttcttcgagtggctccttatcgcaagatttcagttactcaatttcgccagtgcattcaggtaccgtagattcccttgtgaccagcactgacccaattgacgataacattgttgctcctaccgctggcgatttaactgacggaggtaagtcaagggccagatcgacaaacaaaaccgagaaacgagctagtgttacgtcagactccagccattcagtgataaggaactcgtatggtgagatcattaatgataactctgaaaggccacacttagctcgtggtgattcataccaacaatcagtagatgatctcgaaaattctgcttccaatggtagaagcggaagatcaacctctaaaagattccaaaacgactacttgcgttcattatctcgttcattacaaagagatcatgctgatcacaaaagtgtttcagatgacacgggcgtgcaagcccaagatatttattcgaccacaagctattctatttcccaacgctatgtggaaaatgcacctcatgtgattcgtgaatctcacgaggagcatacggcgaggcatcctgcagccccccatagaaactaaggcttcaagtgagtctactaatcatgttagagaaaacatcacccaagaaaatcaactagaagaaccagatgaacaagaacaaggactcacagaatcccaacctgaaacggagcaagagctttgcgaaacgaacattgaacccaccagccaaattcctgatatcacagagactaacagcgttccagtcaaaacacgtgatcaatttttctctaaaatccaaaccgattcttctgatattaaagaactccaagaattatcagatgaggagagagatatcaaagacgaacatacatctgaaataaatctgaagggagctattgaaacttcaacgtctagccaaataggtgagtatgagtcacgtgcagccataatcaatgatgaatctatacgcgaggcgaaacagaatcaagaattggagtccgtggcatcaaatgatgaagctggaaaaggtatcggtaccaatgatatcattgacacagctgcatccaaaaattttgtagaaaatttggagcaggaggacgaccaaaagaaattgagaattatcactgaggcccctgaacatgccatggatgaagacgaaattcctataaccaaaataagtccggactctgaaacatcgattgaatacaagggtccacaggaattgggtctacaaacattgtccacagaagaaaatgcacattctaaagcctccaccattgaggcgttgccagaaagcagagcactcaaggatattaatgaagagcaaactcctcagaagggttccctggaaaaacccgaccaagtggaagaagaacagccgaagaacaccgaaaagggctacgctgacgacacattatctaatgagaccgaatttgccgaggaatcaatcgatcactctgaaaattcagaaatacgtatcgaaaaggaagctacgcaagaccaaggattaaatcaggaagctgatttcaacgcggatctttcacaggttaaatctcaagcccatatccccgaagatcacgagccagaagatacgaatgaagcaatagaaccgcaagtagaagatatttcgagtctaggaaactcaagaaatgaaatcaattccgggaatcgtgaagctctaacagagctgaatgaagatgatgtgactggcatatctgaaagcatatccaatgaaaacaaagaggttaccagtgcggctgcagatccaattgaatcagttactgatgagatagactctctcttgaatgaattgaaatcagaattagaagaatccaatgtcggagctcagatagaagaactcgttaaagaagagccggtttttatttttacatccttagctggtggaggtatccatatgcctagaagaacaaacagattggctacaattttaaccgccaatgaaattgaatttacatacagggattgtggtactgattcagaggctagatcaatatggaaaacatacagtgcaggtagattattacctggggttgtaagaggaacatcattgattggtaactggaaagaaattgatgatgcaaatgaagaatatcgactgtacgaaatgatttataatacgctctgaatcaaacttattctggccgattccattatgatttcccaatgaattttatactccatgccctctaacgttaatgcaccaaacaacacagcaggtctcgactatataattcagttcttttgttctctacttctttttattgaaaataaatctagattctggtagtcgtgtaactgtatactcttacagatgtagcttatacgaatcaactaggtacataatgatgtgttcagtgtcttgtcatattggtaattattattgattatcgtgatgcccaagttacttgttgaattgtagttaacctttacgttttgatgatttattgaaagtcaacagtctcgtagtatgttggaagatggcccagaggttgcataatcctgggatcagtccggcaatctgcctgaataaatggtttttttaaacaaagaaaaacaaagaacggatgttcgattatcagcacatgttccttcttgattggtccttacttatactacgttgcattttccagggccagacgggcaaagaaattgttgttatctccttgaaaatatcgggttgaagctgaaaacatgttgtattaaggcatataaaatcaggagacgcgcacgaaagcgagtatctcttattagactttgaatagtcctatcaatatacgtccaagtggccagtttttttttttgtagttttgagctattattcagtgaatatcgagtgatatgtataccacctcccactgcatgcaaatagtgaaggagccacaaaatattaattgtgcgtatcacaaaaaatgataggtaaaaaaagctaaaggaaattcataaataccacagaaaaggccatgatgttaaaaaacacatcaatatgcaagctgaagccgcagaagaacctgtgggaaatatttaaatagaaatgatgtatagagcgacgtgctgcaagctgacctacgcaaattggatcttccttagaaatacatgaaggatctaacggatcttcattacagcaacctgtaccaataaatcctatctttgccacagaaatggatatgttcctgaagtgggtactgcgtaagttatcaccagttacctaatacactcataatggatatttcatgtagacagaaaagtacaaaatgaacgcgttccaattataaaattcaaaccttttctcggagataatacttacagcttattggggtggccatagaaatgactacttttggccagatagccctggccgccatgacaatgtgtcagcttccagttttgctagtacttccacaaatatgacatctatcatcggggataacgacttaacgatcataaaggtcaaatcaaggggcgagggttttgaagccccgaatgcttgcatggcgtcttttagatacttcgccaagtaaatttcacttgcactctggcattttacgcaaagcatccgaagaactgaaaaaaaagggaacaagaagcaatatgatgtaacacgcagaaaatgcctctcatgaatgaatcaaaaatgttgcatcaaaaagcattaagaaatatggaacaatcgaagtatcgttcttaacaacgggtccagatgagtattacgtagctgctgaaacgtatacgcatgttttgcaaataatttccacacttccctctttttccatgtacaataactgatatggtttcatacataccgaaagaatgcaagtaacggcagtcgtcattatccctatgacatggttttgtctctaatctcaatggaaaaaggtgcttttctcaaaccaaggttcgtacactaaggtcgaagcttgagatattgcttttcatgctacattagccactaatgtgaaaagataacatcgaaactctttagattacctttaaatgcctctcttcgtggaagtcggtccaatatcaccaagaccacgacgaatagaggcgcaggagacattcttccatctgtcaaaagaagtgaatatgctgcagccagacaaccaataacacagcattacataagagaagaggtactttttctatcaccgactggaatttaaaagccgtccggaaaatcccattcttagattggacaatctgatgtttaactcttgctttttttctctcccttagcagctcttgctaggaagcaattatcttgtgcaggcttaaagtttcatggagaaccctattgacctggacctgtgcattgtatttctaatcgctacgcgttctgtgcagttatactgagacatcaaatatggctgtgaagaaggagttccaataaagttatttttggattagctaatgtcagggacaaaggaaatgaatgcagctctcccttgcaccagagaatggtctatgggagtgcaatcttccgtcgtccattgacaccagctcggttcgtacagaaagataatatttacctgccgaaaaaaacagaccaggcagtctggtgctggcgtgaggctccccagaaggtctaggcccacacagccaaaacgacttcttcgatcactttagtacgagagggcaggccccagtcccattagtttgtaactggtaactactattccaatcccgtcatcacgtatgcccttcggcaggtacatactaaatgatgagcttatgttttttcccgaaatctcttcttgaggtagaataacaagccattgtttcatgccttgtttgtacggatcattatgacaagtgacgagaagactaactgtgggattaacgatccattcttctacggaatatctgccggtttatttttacgtaaatttgccggtatcctgacgttgtctcaattatgtaattgaagaagaaaagacgtatttttactatgtagttcgaaccccaccaagctatcaagattttttcctcccagatttgtcttaatgcttgccttacaaacgagagaataatagaccaatctagtgtgtcctggttagtctcggaacgtccgcctcacgcagaacttactgctactatttttgacgcgcagcggcaatagattatcaagatccatacaaaaacatgtaatacgccgaaaaaacccgccagagaaaaaaagagattacgtaaacataatacaataaacaaacacacaacggcttcttacgtattgttgtgcgttatcctgttgcattttccctctgcaaacgaggaaaaaaaacctaaacaaagagtcaattgccgacacgtcagaatgcactgaaaaagatacggatgccgtaacctccgattaatcccctattcttttttttgccaggttttctctatcgatacgttatctgactgggctatgcgatatttttctttgttattccatatattatgtaatgctgttgtcataaacaatgttgtattttcagcaaaaggaacggccctaccctaccatctagaaaaaaaaaattccacttttttcttaagacgttattggcttctccttcctgtaggaaaaaaacaacaaaaaagctgacatctgatgacatggaaccatctttctttcccacggcggattctgcagaagccaaattgtcgtacactttcccctattcctctctctcatgtcctacagtcactagctgcccattgaaccatattcccagtatgtcaccgcatgtttacggcaatgtacctaatctaccttgcaatcagacatcgtaatagtaactaatgcaaaaaatttgtctgtttctttcaagaataggaatggactaaggaatttattctccattctaccttcaaagggtcataaaaaagaaagaagaagcttgaacttgagtcttttgttgattcatcctacattaaattgttcgtcaccggaggattccagcttagtttccgcacttaagaggcaataaccatgccataattttgggttcctacgaaatatttggaaaaaacgtaataaaaaaaaaattcgtaggaaaaaaagtgaaggtctctcatcaccccgcagaacaggaaaccagcctcttagtgaaacccgcaccgcaaatagatttccatgagatggttgttcctttttacctaattaaagtttgagaatgcggtaaacaggggactacacagattgtaagagagggaaaataattctcagtccaatacatgctccacaaaagccgaatgagaattggtgacgatatatattcattttgtgacaaaataaaggcgctgcagtatgcaaatacgatgtctgttgcgtaatgtgcgatttcgttatacatgctaatatgatgtatgtttgttttgtattctcgttatcatgccacttctgatttgagggttctagctcactttggatttagttatcattattaaggtatttagcagttactatttaatgcctgtttatacgtaatacgtgctatatggcatttattagaaggcatatatatatatatatgtagcagtcgtgactgtttaagattttccttcgttttattgttgttcgaaccttattacataaggaaacattatattttaatcatattacgatattataatattatataacaactgaaaaagtctcgtcaagtcgaacaaagattcatttacaatccaaagtataaaggaatcagaccgcgtcgtatcgttaactgttaatttgcactataagtggaagtaaacgtaaaactcaaaaacggattaagtgcaatactattttattattacggaaatctttttcatttcacacttttttctcttttttctaaacttttcactgcctctgcaaagtttttaaaggaattatttcaaagtataaaagagatagaatcttttttgctactccatattcatcacattagtgaacagaaagccataactacccaggaaaggagcatactgatatcaatttatcactttttttcactgttatatcttcttctcttttttagtacttcccgttccctttttttttttttttttttttattcaggtttattttttctttgtcagaaattaaaaacctcgtctagtagacacctagaagaataaagactcaaagaatacttaagagagaataccaagagacgtactgattcgtggcggtttacaacaaaaaatagtgaaaagaagcctaggaatcagcagagaatataatgcacgattagaaactgagacgttcattaaagaatacaacagataaaacggttaagagactgttttagaataatcgaaccccatattattgaaggtagaatttgaaagtcagttagtgtgttattcattctacactaaagtctactcgatattatagtcttactgagatatattttatcatacattttgcccatctcatccaagaagatatactgataagaaagatatgcctgacttgagaaatatcgctattgatatggtgaacttcaccgtatcgaatgtcaatgatgccatttcattcaaaccacatctttgtagagaggtacctcaacaacaatacaacgctttgaagaattggtacattgaatttactggtacttccattcgtaagaataagtgtaggttgtttttcttaccaattaacgtgtccgatgagctgcaacagctgaaccccgttattcctgatgaagtcaagatcaccagtcccgatgacagcaatgtaatctattacaagaacagattgatcacagaactcgactttgaaaatgtcaagcgtgttcagagagcttgtatttatattgcttatgctgctgtcaaccaactgctaaatttggaaacggatccatctatgatcttggagtcgaatcagtcgactgccactgctactaacatgggcaacggaactgccccttcatctgcagcatcttctcatgcaaatgttgatggattagaccctatggaatcatgccacatatctttaaaaagaggtgaagttttaggattcagagagttaggtcacttgataagcatcacgccatggcatttccatcgtgtctttaaagtgatcactggtttaaccattcgtgaatatggtcaattgtgtgtcgaatttttgaagaagaactgcagtttggtcaaccctgttaaaacaagagtagctaagttgaaggaaaacggtgattcttactcctgtcttgacgatgaaaatttcatgaacgatgatactgtcaagtacgagtgtgatgacaactgtgtcattttacccgattacttcattgatttgaccaaatccaaggaatccaaaagaaaatcgaatgattctccaccatccagtgcaccttctaaccgttccgctaacaacggtattgatttcactagtgaaaacgattcatctaagaaccatcatccaacttctgggttatcacgttcggaacagcgtaaacgcagaagctctgtaatgattcaaaagattagaaatgcatctatttgcactttctcatcgaacccctctattcaatctgctttgaataaccccggaacccctattcaaagctctgattacaaatctttgacaccttcacctggtaaccaaagtaatcatgttcaatcttatgattttgctccttatctgcgccatccttctacatcgactattggattaagacggaaatccaaggctagtcgtaacggtagcgttgctgggttggaagctcacggaatggtttccaagcccaagcataaaagaaacactagcgaacctactgttaacaatgatataaacattagggagggatatttgactagtaagatgtctaataatcaagcgctaaatgacgttacaaacaacgatactggacaaaaccaaggtctagcggaagcgttcacgttcccatctcctcaagttgctttcaagtttaacatgttcgacgaatcaaacttgaacaacttggacatggacatgaacttgaactctatgaacctatctgagatggctttgaattccatctctacaaacatggatgcgttgactcctttgaaccaactcgagaacaatctcagtgctcctgaaacatcaaatactgctacgtctggtaccacaactacgacaactacagatattgatttgaaccttgccatggacgacattacagaaatgtctgccctatctctaaattcaaacgctcaatttcaatacgttcatatggataagccacagcaacagcagctacaatctcttaactttaacaatggcccactacatctagacgctacccatcaacaccaaataagcgaaccccaaagcttgagttctacactaccaaccactcctcaggatgtcagtgctttgttaccgttacaaggtcatgattcgttgttaatggaattttccccagaggaacctggcaacatcgcatctagtgtggatccattattcccattgtatccctcgtccatgttaaccgctatgcccagcgacgcttttgcaacttatgaggatttcatcgcgaactaattcggaaacgcgcgttgtaatatagctcattcttattttttcactacccttctcttacttcacttaagaactttctattccaatagtatattattactttcaattcttttattttttcccgttctttccatttgtatttttgtctaattgattaagtattgattaatagaaagaatgaacttttttatttgactttacttctatcttcaggccagctgatccattctcttccctaatgatagaggatacctactttttcccatgatgccgatgcaaaacctccaggcaaagaatgaaaaatcaccacacattgaaaaataagacatacagttacccgtattttgatgtaaccctggcaattgttccctattttacttgttgtttgtttgtgttttctatttttccccagcaacattccagcatctacgagagtttctgtccaagtttctccgcttcttcgtttctccatagtttttttttctctttggaatcatgagacgacccagtcgagagaaaaatccagtgcccagctcgtggcgcacaggtcgtggactggtggtagctagctactcgtagtccttgacccttggtaattggcccttaatccatatttttattttttgttacctagttcccactgcgctgcttttatttaggtgaaaagttgagaagaattaaatattaaaataggaacttgaagttttgaaacaactaactatatatgcaggcaacttgttggggttttcctagtggaacagacattgtttcccctttttatctattgatattttaaggttttataagcagtatataccatacaaatagccaaaggtttgtgaaacaaaaggttgaggtttaggttaaggtttgggggagtttataaatatttataaatttggtctcttttgaaattgagttttgaacaaagggaaacaagtaatttacacagaccttcctgctataggctacttaggataaaaggactgactaagcattcgtatttgtattagattgcatttttttttggcataaacttcttctcccttcgctatgactcgtgatattgtgaaccatttggtgttcgaagtggcgactgaggttgctaataaggtgggtggtatttattcggtgttgaaatcgaaggctcctatcacttgcaaacagtacggtcctaaatatttactgctgggaccattgaacccacaatccgtgcaagttgaagtggaacccgtggattgggaagacgaatccaacttccatattaaagaggttcaatggtctcttagatctatgcataaccgtggtgtccgcttcacttacggtagatggttgattgatggtgctccaatggttattcttttcgatttgaactctgttagaaattatttgaatgaatggaaggcggatttatgggaaatcgccggtatcccatcccctgatggtgattttgaaaccaacgatgccatcttattgggttatactgtggcatggttccttggtgaattggcccatatgaaccagacaaatgccatcgtggcacatttccacgaatggttggctggtgttgctatcccgttgtgcagaaaacgtaggattgatgtggtcaccattttcactactcatgccactttgttgggtagatacctatgtgccggcaatgtggatttctacaataatctcgacaagtttgacgtggatgcagaggctggcaaacgtggtatctatcatcgttattgtatcgaacgtgcggcagctcatagcgctgacgttttcactactgtttcacagattactgcatacgaaagtgaataccttttgaaacggaaacctgatgggatcttaccaaatgggctaaatgtcatcaaattccaagccgtccatgaattccaaaatttacatgcattgaagaaggagaaaattaacgacttcatcagaggtcatttccatggtcagttcgatttcgatcttgaaaaaactttgtacttcttcattgcaggtcgttatgaataccgtaacaagggtgctgatatgttcattgaatcattggcaagattgaaccacagattgaaggcatctggatctaaaatgactgttgtcgccttcatcatcatgcccgcaaaaaataaatcatacacagtcgatgagctacgcggccaagctgtggtcaggcaactggaaaactcagtgaaagatgtcacacaattgatcggtaagagaatctttgaacacgccatgagatatcctcataatggcaccaaaactgaaattccaactagccttgacgaacttttcaaaccaagtgataaagttgtattgaaaaaacgtgtatttgcattgcgtagaccagaaggtactttacctcctattgttactcacaacatggtggatgatgccaatgatcctattttgaaccagatcagacgtgttcaattgttcaataattcatatgaccgtgtcaagatcattttccatccagaatttttaaacgccaacaatccaatcttgtctcttgactatgacgaatttgtgagaggttgccatttgggtgtgtttccctcatattacgaaccatggggctacacaccagcagaatgtaccgtcatgggtatcccatcaattactactaatttgtctggtttcggtgcttatatggaagatttgattgaaaaggaccaagccaaggattatggtatttatatcgtggaccgtcgtttcaagaatcctaacgaatctgtagaacagttggttgattacatggaagatttcgtgaacaaaacacgtagacaaagaatcaaccaaagaaacagaactgaacgtctttcagatttgttagactggagacgtatgggtcttgaatatgtcaaggcaagacaacttgccttgcgcagagcttatcctgacgaatttaaagaattaactggtggtaccgatttagatgattcaaatatggattcattggccggtaatccaaaggttaaagttgccagaccattgagtgttccaggatctcctagggattcaagagctagcagtgtgggtgctgtaatgatgactccaggtgatttaggtactttacaggatgccaacaatgctgatgattacttccatctatctatgggcgataacgaggatgacgaagatgaagaccaattcaactaatagcctttaaaacacttctattactagcatctttcgctactttaataccattccatacatattaatatcaaaacttcaactattgtcgcagattaatatataacaagcacaaattgcaccgcatgaatttacaaaagtaatgtatgcattaaatatatacttataacttagcacattgatcaactgaaggatactgacaaaggtaacatcaaggagccggagctactttagaccactcacacgtgttatattgacagatcagaatctgcgattatcttgtgtacattctgtacacgtgacgtgacttatttttcaaagccttctctgcattgatttgcaacttaaggatgaaatcaggaagtcaaaattcataaaaaaggttcaaaaatgcaaaagccctagcatttaaaagccaccgtcattgatctaacggaagagacattcccataaagcaaagctatagccgagagaacatccaggtaagctagacagataaatattactttacgcaactattcttcgatgtttaaaaaagaacccttatcggaaaataatagtcgtaagcctgaggagccagaaccagtcgaagggcataaattgaccaaactgttcaataaagttacaggacaacctagttcttatgttaacaagtcagattacatcttcggtaaaacgttaggggcaggtaccttcggtgttgttagacaagcccgttgtatttcttctggtgagaatgtcgcggtgaaaatattgttgaagaaagctttgaagggccagtcagtacaactacagatgctatatgacgaactatccatattacaacaactaaatcacccaaatattgtgagatttaaggattggtttgaatccaaggagaagttctatattgttactcaattagctactggaggtgagctatttgatcgtatcttggaaaaggggaaattttgcgaagttgatgcagtattcatcgtgaagcagattctacaaggtgttcaatatttgcatcagaggaatattgtgcatagagacttgaaaccggagaatattttgtatttgaataaatcagatgattctcctttggtgataggtgatttcggtattgcgaaggaattgaaagatgataatgaactaattcataaagcagcagggtctatgggttatgttgccccagaagttttaacatcttctggccacggtaaaccgtgtgacatttggtcaatcggtgttatcacgtacacgttgctatgtggatattctccatttttagctgaaagtgcggatggattcatcgaagaatgcaccagtggtcagtacccagtagtattccacaagccatactggaataacgtatctaagaccgcaaaagagttcatattatgggcattgacggtgagcccaaaaagaaggcctactgcaacagatttgataaatgatatctggatcacttctaccgaaaaatcaaccactgatttgcttccagaaatccgcaaaggtttcgatgctcgtaaggaattccgtgatgctgttgaaatcgttaaattaaataacagaatcaaaaagttgaaggtcctttatgagaaccaagatgaatctgataccgatatcgaggttaactcaactgatagcttttctaagaatgattattctgcagactcgttgcaaagttcattgaaaagtctatcaataaaggatagtcatacagaattgaaatcttctctcacccaaaacgccttcgcgcagcttgttctgactgcgtctaaaaacaaagaaaaagtaaagagcttccaggactcaggaaactagaagtttcactatctactgaatatttcaagattattatcatatgatcattaggagataactgcgcatgtataacttaacaaccatcaaaagtagcaccggtttcagtttcattcaattacataagttattataacatctaataaggacgattttccctttaaaatcaacatttgtgggcattggcttggcatgttacgggatcatcggataggttgtatttatgttgaaacggatcataaactatgatcgggtaactaccaatataataggcggttaagtatcaagatgatacataaggattgtttctagttgaaacatcattaaccaatctgagttattatataaggaggcattagatctggacaaagacgatcaacacagtcatgacagatcgctaggtgcatcaacatacactactagatatatagctaataaagaatatggattcatcagataccaaagatcttgagacaacaacacgtgactggaaataccagtatcaccaacaatttaaccactacacttgtagcaagaggtatggtccagtttgaagggatgggggtcgtatacttgcttcagtagctcagtcggaagagcgtcagtctcataatctgaaggtcgagagttcgaacctcccctggagcattatttttgtcaaaataaaaaatatctaccaatatgataaaaatagcttttactcgcaaagagtgaacggccatccattcggttgacttaggatacattttttggttcactactcattctggcaccaataaatttgatttaatttaagatgatatacattatacaggcacttatttgagctttcgctttttgtgtgttacggcattctttgagtttttcttcaaaggcctcccacgtttcttaggaacgtcttcgttgtcttcggaatccaattgatattcttcttcaatctcctcatcattatctgaatgatcttcatagtcattcctgtgatcttcgtgctcagagaaaatttcaggctcttcatccatttcctcctcaggttgatcttcctcttcttcaacattcgcaacaacctcttcatcatcgtcagagggttcctgtggagcttcagtatagttaattttagtcctttgagatcttctcaagttccggtccgtcgttgagatatcaccatactcaacctttagttgctcaaaggtttgtagtagtgatgacattttctgcaagtattccttcaatatcaagaattttgatcttgatttgttgtatttgtattcttttggtaatggattgcagttaaatccctctactgtatctaatttagtgattgttgtgtccttcttcaacaaaccggccgaaggcaggccattcgatggttcttctttatctgagcctatgtctgaagcgtttaccgtgtccttttgatttgcttccttcgaatcgtcgactgtctttttatttttgtttggttcttcctccttgaacactttatactccaatagtttgatgaaatcttgcaatgaagaactgttatggcacatttcataccagtaaacttttccggtattggtaccattcatcaaatcgtgaaccaacccaggggtgtcatgataatacaatttaaactgcatactgttcaacttaccatccctactgaatagttcgaagggtgtaattgttccattttcaaactgttgtaatgtcttcaacaatgttatgggatcacaataattagtcggaatatgctttttagcttttgaagattgataagtaaacaaccttggcaagtaaaaatctccaacgtagggaattcttccaataaagaattcgagacatcttaatttgtatatttcatcttcataggggtcatccaaaggttcccgatcatgaatttcttcgaagaccaatttagaccatttcgaatagtcccgttccacgcttactgctaacgcgtcaaacttctttttcttatctgttgtgacttggttgtactcttgtctatactctctcatattttttttgagttcatccagtaaagcgaactttgcagataaatcttgacgggtaccactttcaagttgttttttgacatgctttttggatctacgcaattccattctttcctttaccaaagtacatagcttcttgaaatgttgatgagcagcatctatgccctgaacaagatgtcttggagcgtggaaggtttgaataccaaaagaggggtctttctttagatgcgataaacggtatatctctgtgtgtatcttctctgaatatgaaatacaccactgcgtcaatgtccttaaaaatacgaccctgtcagatggcattagtcccaaaagaccaagtcgttccaaatctggattatgtaatgggtcttcttccaagggcacgatcaattgctcagtccacttgtaaatgtttggggttaagatctcaggatgattaggatcaacagcttcagtgtcatcgtgttcaaacaatttagtgcgttccgcatttaaagttgactggaccttccattctctaggatatccaaattccacccctttatgtctcaattcagatattagtttgaatgctttggatgaagtctgcagggattgcaatgtgctatgcgatttgcgattcaaagtcagctccattaatacaacataaagtaaatttgagtaatcctggcagcgtctaatttcccttgctggaatataatctgcataatactgaggaagatcctgttcgtcgtctatattttctgggtaaatatcaaggccaatttcgaggtcttgaatagataaagaccatagttcctgaggcaaaaatttatgaaatttgttgatgaatgacatgacaaagaccagatcctttgcatatggtgctttcctcatatgagggaacttcaatctcgaaaaaacagatgtttgggtcttgaagtcagtagataggactggtaattgtggtgcccaattttcgaggagaattgggttaacagctaaacttaacgaaggtgctggttttgatgcagatttagaaagcttgatcgcatccttaggtagaactggcttcgatgtttttccatccgatcgactttctaaatcaccggagggtttgggagaatcctttttcttcaaatcgtcagcggtttgtttcttagagatcatgctagcaacactttctttcggtttgccattggtttcaacatcgcttttgcttttcatattagcctttttacttgttgtgctattttttttatcactgttggcattgatggcagactttttttgggcattctttgccttttccttatccttatcattgtccttatcacttttcttcggcttagccttattggtattggatggcctatcattcttctttcccttcttcgtcttagcgaccactttcctattataaggccttttctttctggagtgttctggttcttcatcgctttccacttttctcttgactagcactctatttgatcttcttctcgatataggttcattcaatggagaagtgtctgtatttgattctgatagctgaacggcaaaattcttaaagtctgtgatagaggtttgcccgtatttcttcgccacgggatgttcctcgggaactacctcgatcatttcttccttattctgagtttccattgcacgaatggtaaaagacttatcaaacgtgtaaagtatcttttactaccttcctgtggattaataccgaataatgtaattgttaaattgattagcaaacaaaaactggaatgatcaaatcctttcttcagctggtattactagtctaaatggacttaaaacaaagacaaccagtctttaagttctgctgtatcgagcactgactatcgaataggagaagttacaggtctggtgaattagactcactgcttgatctttaaattgcagaaagtcgtttatttaaacaaacctggtcctcgttgtaaaaactttttgttcctttcatgatttctatcaaatcgattctttcgttggaaagtaaagtaggtcgacgcgttattctgccaattaggcggcaggttcccaggccatcgaagggaaaaaaaaccaaattccaaggtcacgtgcacaaattgttagactggatgccaatggttttaccaggaacaaactaaacgtagtgaaaggtattggcagcgtgaataccgtagcgtttatacataatattcaagggataagatgcgattatatacagaggaagtgattgtgaaggggaatagacattatgtttcagtactttcttttaatttccaagagcgaactgggaatgacgtgaaagggcgaaaaataggagaagctggcagtcctagtaacttgaaacctgcactgaacattcttactttcatattgaatgactggaattttcatctagcgatagaaataagtagaacattctttgctgtatggaagaaggtccctgtatggtcaaaattctttctaagagccgaaagttaccggataggacattctaaaagttaccgggtaccaagctataacgatagttagctttgccaacccttacaaaaaagctcaaccgcacacatctattagcctgaataactctaaaaaatatatcgaagcttatatgcacatcctcgtctcatctcatcactgcatatttcggcagaaataattaaagttcttgtacataaatgcaaagagtgaaaaaaaagttgcagcctcactatcagccatcttgatgagaagcaaatatataacggagtaaagaagatccatcggtgtgaacttctgaggcaaacacaaaacatacccttcgatacgcaaggatgacggctcgaccagagttgaacactttacatagtgctgccacagaaccgacaattatccattcgaataatgaaagcctgaatgctttagactacacaggaaatgatgataaaagtgttgctctgagcaatgctatcagccgaacaaactcgacaggaaataagataccaaagaaacggaagcccagacggatgttcactacgcctggtagattccaacagcaattggcaattccaacgagttatttggagagaaaaccaacaaccaaggcagaagccaaagggttttactattttgtatcctgcatgaaacagggaaaaataatgctgtttgatcaaacattagataggatcgatcaatgctatgataccatgtggacatggcccggttttagtcatggtgtagacttttatcagtcccataaagatgcgaaagttttgggtacttttttacaagtgttaagatgttgctttgataccaggtcgattgtatttcttccgttgttcccagtaggaattgttttttataagagagaggaagatattccagctgtaatttgtttattgttggctctaatgtattttgcaaaattgttatccaatacgacggagtatgcgagcgagcattttggacccgtttttggctcgttattgaacgctacgtttggtaatctagttgaattgatcatctcaggtactactgtctccaaagatgacgctattcttaccattacttcattaattggtagtgttatttccaataatttattagtgattggttcgtgcttctttttcggcgggcttgatggtgtgataatgcactcgaaagctgccatagcaaaccatttattctttctttccagtgtcacaatggctttatccttgacttctgtgatagctgtaattgattctgggaaatcactacgttttaagatggatacttcgcaaattggcgcagcgttgattttcctatgttacatcatctatctaatagtgtccactaaccaagaattcaaagcattgagcagtaagaaattaaaagaaaggtctttgaaggaatctgacatagaaactttgccggaacttgattccgatagcgatttcgaattcagtgtgggagacaaaaaagatgacgaagaaaaagatctcccacctaagttagtttgtttcataacattagcgatcgctacagctggattaggcccaacggcgaatttttttgttgaatctttaaaggaattgactgacgataaaccgatctcaaaagttttcattggtttgataattttacccttggctggttcgctaccagaacatatctcatctttgatatctgctcatcatggccaaatggatcttgcggtatctctagccatcggatccagtaaccaggttttgggtatggtacttccaattgtccagcttatctcctccagatacccaagaaccggattcacattgtattttgaaccatatgttgccggatacctattcagttcaacatttgtatgttgtttcacattaattcatggtctactattttctgtgaatatcttacacggaacccttctactagccacatttggcttcataatctatttgactttcgccaactagtaacataatatatcaggttaagtaaagacgtagcgatagttccaatctcaatggagttttcttatcttccatattacaatttggtatgttccaaaactttcttatcaacatatgagtatgcgttttaagcttaaggttaggattgccaattcttaacctattctcctctaaggtcatctgtatggggggtttagttagttttatgcagaccacattttaaggaagtgggaagatttcaaggtccgggtaataacctggaattcttttctgaagaaaacgtttcttttattccctgctagatcgttttgaaaattttcatgatttgaagctcatctcatctcatctcagctaatgaaaccagacaaagaagaatattaaatcggaaacagtaggtcattcttcatcaagttttcgtaaccggtaggccaagttgtgttaggtattattacttcgtcgattgagtgactggtgaatagactcgtttattttttttagtgcgccatcggtgttaacgaaagagtaataataatatccgggaaaaacagtctaagtcaagatggatatttccaaacctgttggtgccgaaattaccagcatagacttcagcgtcttgacttctgatgaaatccgtaagttgtcagctaaacaagtcacaaatcctactgtgttggataatctaggacatcctatccaaggtggtttgtatgatttagctcttggtgcctttttgaagaatttgtgtgcaacctgtgggttggatgaaaagttctgtccaggtcatcaaggccacattgagctacccgttccatgttacaacccactgtttttcaaccaattgtacatctacttgagatcatcctgtcttttctgtcatcatttcagattgaaatctagtgaagttcatttgtacgcatgtaagctaaggttgttgcaatatgcccttatcgatgagagatatcaaattgataacatcagaatcaaccaaatggttgatgaggatgaagctgaagaaggtgaagaggaagctgatattaacggtaagactacaaattcgagcggcactcaacatgctttgagagagttaagaagaaaacgtaacgaatttgtcgatatggctattgctaaggctctttctgaaggtagaaccactgagcacggaactttcactgctacagttaacgatgaaagaaaggccttaatacatgatttccataagagattgctatcaagacctaagtgtgataactgtggtatgttctctcctaagtttagaaaggatggttttaccaagatctttgaaactgctttgactgacaaacaaataacaaataacagggtaaaaggtttgattcgtcaagatatgattaaaaagaagaaccaaatgaagaaactgcaagtaaacgatacttcttctgaatctgcatcgagagacgaagatggagaatttggaaccgctagatcaccagttaacttgaaaccaaagactggttccacttatattctctctacagaagttagaaatattttgagagctgttttcagaagcgaacaggaagtactacaatatgtattcttctccagaccaaaccataataaaaagatagtcacagccgacatgttctttatggaagttctaattgttccaccaactagattccgtttaccttccaagttgggcgatgaagtccacgaaaacacccaaaaccagttgttgtcaaagatcttaacaacatcactgctaatcagggatcttaacgatgaaatgtcgcgcttacaaaaggataaagtatctgctgatgatagaaaggtaatctttaacagattgatgaatgcttttgttaccattcagaacgatgtaaatgccttcattgattcaacaaaggcgcaaagcagttcaggcaacaaggtaccaatccctggtctcaagcaagcattggaaaagaaagaaggtttgttcagaaaacatatgatgggtaaacgtgtgaactacgctgctcgttcagtcatttctccagatccaaatattgaaacaaatgaaattggtgtgccaccagtgtttgcaacgaagttaacatacccagagcctgttactgcatacaatgtggcagaattacgccaagctgttatcaatggtccagataaatggccaggtgcaacacaaattcaaaacgaagatggatccttcgtttctttggttggaatgactcttgaacaacggaaggctttagccaatcaattattgactccttctacccatgatgttgcacattccattaataagaaagtgtaccgtcatatcaaaaacagagatgttgttattatgaaccgtcaaccaactttacataaagcttctatgatgggtcacaaagttagagttctaccaggtgagaagactttgcgtttgcattatgccaatactggtgcttacaacgccgattttgatggtgatgaaatgaatatgcacttcccacaaaacgaaaatgcaaaagctgaagcattgaatctagccaatactgactctcaatacttgacaccaacatccggttctccagtaagaggtcttatccaagatcacatttctgcaggtgtttggttaactagcaaagactcatttttcactagagaacaatatcagcagtatatttatggttgtattcgtcctgaagatggacatgctactcgtaacaaattggtcactattcctccagcagtcatgaagcctgaacctttatggactggtaaacaaataattactacagttttactgaacacttgtcctgctaacatgccaggtatcaatttgaactccaagaacaagatcaagaatgaatattggggcaagtcttcggaagagaataatgttgttttcaaagatggtcaattattatgtggtattttagacaagtcacaatatggtgcctccaaattcggtatcgttcattccctacacgaagtatatggcccagacgtagctgctaaagtgttatccgttctcggtagactattcacaaactacatcactgctaccgcatttacttgtggtatggacgatttgcgtttaacagctgagggtaacaaatggagaaatgacattcttcaaacatccgttgacatcggtagagttgccgcagcagaagtgacgaatctagacaaagatgtcaagtcagatgatggtgagttgctcaaacgtttagaggaaatcttgcgtgatgataacaagttaggtattctggatgctatcacgtcctctaaggtcaacagtatcacttcacaagttgtttccaagtgtgtaccagatggtaccatgaaaaagttcccttacaattctatgcaagctatggctctttctggtgccaaaggttccaatgtgaacgtttcccaaatcatgtgtttattgggtcaacaagccttagaaggtagaagagttcccgtgatggtttctggtaagacgttaccatccttcaaaccatttgaaactgatgcaagagctggtggttatattaagggccggttctactctggtatcagaccccaggagtattacttccattgtatggctggtcgtgaaggtcttatcgatacagctgtcaagacttctagatctggttacttgcagcgttgtttgaccaagcaattggaaggcgtacatatttcgtacgacaactctgttagagatggtgatggtacgttgatccaattcttatacggtggtgacgctgttgatataaccaaagagtcacacatgacagaatttaaattctgtgtcgacaattatgatgctttgttaaagaaatacaatccatcagcattagtcgatcatttggatgttgagtctgcattgaaatactctaaaaaaacattgaaaaacagaaagaaaaattccaaacttcctcattatgctcaaacctcaaaatacgaccctgtattatccaaattcaatccgtctaaatatttgggtgctgtttctgagaacttccaagataaactggagaaattcatcagtactaatgatgacttctttaaaaaggatgaaaatgtcaatgaaaagaaattcagagcattgatgcaattgaaatatatgcgttctttgattaatccaggtgaagctgtgggtattattgcttctcaatctgttggtgaaccttcaacacagatgacgttgaatactttccatttcgcaggtcacggtgcagctaacgtgacattgggtattcctcgtatgagagaaattatcatgaccgcttctgctgcaataaaaaccccacaattgaccatgcctatcagagatgacgtatcagatgaattagcagatactttctgtaaaaacatcactaaagttatgctctcggaagtcattgacaaagtccaagttacggaaactattggcgctcaagactcttctacttcttcacgttcttatattatcaacgtcagattcttcgattctgaagaatatttggaggaatatgatgttactaaagaggaattagagtctgtcattgctggcaagtttatcaaaactctagaagccgctattgtgaaggaaatcaaaaagcaaaagaaaacatctttgcctgatgttggtattgctttaccaaagtcccaaaccgcaatgggtgcggatgaaagaattacaaatgttgaagaagataatgatgaagaacaaatgcgtaagaagtctaaagaatctgtttcctatgatgaccctgatgaagatgaagttgaaaccatgagacaagccgaacaaacctcggatgaagagttcgattctgacaaagaatctgaatccgagtcggatgaagatatggacgaggcaaaagaagagagagaaaatggtaaacacatgacaaaagagcaacgtgatcgtcaatctgctctaatatcatcgacaaggtttgttaccaagtataactttgacgatgatgaaggtaaatggtgtgaatttaaacttgagcttgccggcgacaccgagaaattgttaatggttaacattgtcgaagatatctgccgtaaatccatcattagacaagttcctcatatcgaccgttgtgttcaccctgaacctgagaatggtaagcgtgttcttgtcacagaaggtgtcaacttccaagccatgtgggaccaagacgactttatcgatatcaatggcattagatcaaacgatgttgccgcagttctaaagacttacggtgttgaggcggcaagaaacacgattgtcaatgaaattaacaatgtcttttctcgttatgctatttctgtttccttccgtcatttggatttgattgcggatatgatgactagacaaggtaactatcttgctttcaacagacaaggaatggaatcctccacatcttccttgatgaagatgtcatacgaaacaacttgtcagttcttaacaaaagctgttctagataatgagcacgaagaactaaaatcaccatctgctaaaattgtcatgggtaaattgaatggcgttggtactggttcctttgacctcctctccaaggcaccaatgtaaaatagaatgcttaataactgtatataacatatagattagttgaaattaagaatatttttaagataatcggtcattgccttacactagatcgagcttgcgttcaagaagatatgtactttacaacttttacataatttacaggtaaatgctatttaactattcgattccaaagactggctttagtttacgaatcaacatccaatcagattttggaacttgatctctgaaagcaggatctttcaatgtatcaatggaccttctagtgatgtgagaatacaatgtatctttttcatcaacatgacgaccccagattggttgctgaccggaaggatcttctaaacgcattgcaacacctgcattggtttgacccttcttgacttcagtcacagattggtgattgatttccaaggaagtgactctaccaagcaacaatgttattctctcctttgttgctgggtcatatttcactgcacagataggagtaccgatcttcaatgaaccttcaatgacatccacaccaatgatcatagggccacgcttgttaatgatttgtagagtgttcaggacgcatgggaaggtagcgtcaccgataaactcagcacgacgcttttcaagtagttccttctggtaggctgtgaaggcatcgaataaatggtaaataatatcagcattgaaaattttgatatgttgttctgcagcatattgttctgcttccttatcaaccttgacatcaaagcatagcataaccgctaattcaggagctttttctaacatagtacaagccttcattatatcacgcttgtaaacaggacctaatccgacagacataacaggaattttcatgtcttttaagaagtctaataaagcttctaatgaacccaatgtagaagcttgaacaacaacacctctaccagaagtatccacagagtctaaaagaccagtcaaatcttccatgacgtcatccatcatttcttcttcatcatcgtctggacctacaactaataatcgggaaccagaaacagccttttccaaatcatttgcagcaatttttacacctagagcagccttgacttctttgtgatgttgatattcagacttcaaacgtaactcacgtaagggttgaggtgtcaacaaggctctgatattcgtcacaatcggaccgttcataccacataaaacgattctgtcaccctctcttaagtaaccattagatagaataacatcgatagtggtaccgaaaccttcaacaaccttcacttcaagaattgtagcttcaacgtgagacaaatatttcaattgcttagacattctcttttgagtcaattctaatagcaaccacaacaaatcaggaacaccttcacctgtaacggcagatgttggaacaatagagacgtatttggctaggttgttgttttggaaatacaattctgagttcaaaccttgttcagcaagagcgactttgatgttgtcaagtctagtttggaactcttgcttaactgctcgttcttgtttgtcaaaggagtctctgaaagagttgtttggtgtaattacccagtcgtacaatctatcgatcttattcaaggcaacgatgaaaggagcctttctgtctctcaataatctgatggattcaatggtttgttgttctaaaccatgcatgatatcaataactaagatggcgatgttacacaaagaggaacctctggaacgcaagttggtaaaagattcgtgacctggtgtatcaatgactaacaaacctgggacatcgaaggtttgttcttcatacttagccataactgcggttttttgttcaatagcgtcaattgggaaataagtggcaccgatttgttgggtaataccaccagcttcaccgccttgaacgttggtttgtctaatcttatctaacaacttggttttaccagtatcgacatgacccaagatacagcagattggagaacgaagatctttctttgctgctgctgcagatctcttggaagggattggttgagaagcatagtttttggtaacttcagtggataattccggagctggagtagtagcattagaagtttcagaaccagaatattgctctttttcacttgtttcttcttttccttcttgttcttcaggttcatcgtcaagagccaaattctcccagtcatcaatcaacgcttcctcttcttcttcgacttcttgagtttcagtagctttcttcttctcttcttcgattgccttttcggactcgatttgttccttggtctttctgactcttttaccgtaaacaaccttctttggttttggatgctcatcgccggatttttctagaccagcaaccttgatgttaccggcagccaatagagcagcacgtctgttttcaagcagtttcttttcctccttttgtttcttagttagaagtttaccctctgcctttaacttttcacgcttagcttgttctctctcacgcttagcctttctagcttcttccttttcttgttcagccttggccaacttttcttcttcttccttctccaatctctcttcttcttccctggccaacctttcttcttcttctagctgcttttgtaactccaattgacgtttcaaagcagcaagaccggctgggaccttcttctttggtgcagcctttggtgccgcaccttcagtggacttgccagcctccttttcagccttcagtttagaagtttgttcagcatgaagtttcttgttgttttccttctgcgcttgttgctgagccttcttctttgcggcttgttccctcttcttctccttctccttctccttcttttccttttccttttccttcttggacttcaagactggcttcttagtatcctcgtcttccttcttgtccagcttcttcttagatttcttcaaagtggacataaaatcttcctcaatggcagatgcatcggcaacttcggtttcaccacttggctcaacagaaccatctatcgagggttctactgaagattcttgaggaacatcttcctcatactcttcgtcccagtaattctgttgattcttctttgattttttcgccatcttgaactactctttcggatacaaaggttctacttttacagttcttccgaaatcttattatgatagacagcaaacaaagtgtaaaagagggttataacaagtaaagagataatgtaaaatccttttaattgatcttacgcaaaacaatctttcaaatagttttaagttgtgagaaaaacctgtactaaaaaataaaaaactgatgaaaaacttcaagttcatgattatacgtacctcgatggaaagaaaaaaataacatactagattaccctgtctttggtgaggtgcgcccaaaattcatctttcaggggccagaaaggtcccattagccttattttcggggtgaagaccggtcgatgccattcagcatcgctatttacgatcggcgttgaagatgtataaaatatcaccttggacggcttgaaaaaaattgacagcttcatctttgtcaacagtaggaagttctacagatattcacaatctcatcgcttaggattaatgatattagagtttcattatagtttggttacagaggccaaaatcagttaaacggttggaatcgataggtatcagtcagtattccactgaggttggcatcaaattataaaaaaaggatttattttgaagaatttcctgatcaatatctgaattgaaataaaagatgtctacgacagtagagaagattaaggccatcgaagatgagatggcccgtacccaaaagaataaggccacttcttttcatttgggtcagttgaaagctaagctagcgaaacttagaagagagttattgcaggctgcttcaagcggtagtggtggtggtgccggtgttggtttcgatgtggccaggaccggtgttgcttcagtcggatttgttgggttcccctcagtgggtaagagtactttactttctaagctgactggtacagaatctgaggctgctgagtacgagtttaccactttagttacggttccaggtgtcatcaaatataagggtgctaagattcaaatgttggatttgccgggtatcattgacggtgctaaagatggccgtggtcgtggtaaacaagttatcgctgtggccagaacttgtaatctactatttattgttttggacgttaataaaccattgcatcataaacaaatcattgaaaaggaattggaaggtgttggtatccgtttgaacaagcaacctccagacattttaatcaagaaaaaggaaaaaggtggtatctccattacaaatacagtaccattgacgcatctaggcccggacgaaattagagctgttatgagtgaatatagaatcaacagtgcggagcttgctttcagatgtgatgccaccgtcgatgatttgattgatgtacttgaagctccatcaagaaggtatatgccagctatttatgtgctaaacaagatagattctttgtcattagaagaattggaacttttatacagaattccaaatgcagttccaatctcttctggtaaggaatggaatttggatgaactactagaagttatgtgggatagactaaacttagtccgtgtttatactaagccaaagggtacgatgcctgatttcacagacccagtggtgttaaggtcggataggtgtaccgtaagagatttctgtaaccaaattcacaaatctttagttgaggacttcagaaatgctttagtgtacggcagcagtgtgaagcatcaacctcaatatgtggggcttaatcacacattagaagatgaagatgttgtcacaattttgaagaaatgaatacaggctactttttttttctcattcttctcaccgtcatcatagtttttagcattttcatcgcattttcatgtagtgttatccattttatttaacagctttccatagacggatctggttagattatcgtaaacgttcattactcaggttgccataacttctgttaaacattaactcaatactgatttgtcgtgttatgtttaaattcataaatagtagtaaatatatgatattttgtgaaatcgatagcaacggatacatatggcctttttatattggccaacatatatgttaagatataaaagcaatgatggatgctgatggtgatatggaaagaaagaatgaatgaatgaaacttcggttatttgacgaagtgaatattattctattagaaatgaatgtgaatagtattggtggaatcctcaaaatcacagcagtattttaatgaatccttttaaggtgcgatatagtacagcttgaattaacaaacaaggaaatctggaggaaaatgcagcctactgatgagagtgtattccattgaataacggataaattcgcagagaaataaatcccttatttatttaacgccattctttttagtcgtggagttgcgtattgccttgcgttgtatgcagaactgttatcaggctcaggagtttggaaatcagaagaataactgcagtcgctctcagaaaatggagttgatgctatagattccattgcatcattagcagcatctgaatatggtttatttccgaaagatatatctccatcttctgcctcatcctcctcaaactgctcgcgtctttttgtcgcaaagtttgttatttcagtcgaagagccgttggttgaccccggcctccacgtcagttctttggatttaacacgctcatggtaagccacgagaccgctacaccagtaaatgttatcctctttcatattgttaacggtaggtctcaagtttttaacgtaactaaaagcatccacaacattgatagatgggttctgtttgagcatatgactgatcaaaagaatcaccaaattctcatcattcccattcgaagagaagacaagaatgttccccatctttgcaagcttgaacaaggtaatcaaatcattgaaacattcaaacttgtgcacaccatcagcagtataaatattggtggtgtactccgaaacagacctgtacaaatgcgattgtagaggttgggcagcgcattcttctgatagagaaacgtgttgtataagcgttttcaagtccacagaatgcttattattgaattccaggatgttactcatggtatcatcactgaatctggtacggtcaaattctttatcgagacagcatatcataaattggtccaactgtatgttcctggcatactccattgcacgttcaacaggaataccaacactgatgaaaaacttgatatcattcttactcaagaagtcatactgtgataaagtgttcaagggtccgaagaacacattgttactcaactgttggggtttcatctggttcaacgtatgagccaatgcataattattatggtgagacatgtctagttgcttttttccataaagaatatcggaccacagattgtaagtagggtgaaagattgagacagagagcaaaacacaggctagttgttaccaatactcgaattatacaaatgaggttcaatgccagttagtaagctcactccgctcttgtcctgagtcaaagccttacgtgagtcgcattgatgaggttagtattcttttttgccaaaagatcaaaaatctgaaaaatagaaaaatgaatttttcaagctctaaaggcttattctagtaaagtaatggaaatggtgtaagctcggtcaaaggctttaatgctggtacaacggaggcggaatgagaacaaaaacaacgacaaaaatcagacaatcagataataatgtaaagctgaaagctgattgtaagtgcatgtttaattcgtcgaagcatcgtttgttttactgtatgcctttttttttttcattcctccattttcttgtgacgctttccaagacataaatgaaaggcgacactttgtgtaataaaagattcaccagtacaaagtgtttacttgtcagattttggcctgttgtccatcccttgacacagggtatttttacaaacataagctagtggtttaatagcaacgtatagcgtagatttgtaaccaacctaatttcgcagtaaaatgagaaaacaattgtctcatatagttaagtaggaaaggatagcttttgtaatatgataatcaaatgggaggtcggcatcgataaagagccggcagaccctggattaatagtatcatcaactccatttgtatctgataatgtgatcaatataactaatccccgatttagcaaatcagatataaaagaattgaaatggttacacaccgttcatcgatcagatatagcacaggataattatccggatttacccttagccgatcacacatctaacggatttgtgaataaccccggtttgctcaaggaaaacgagttttatccattggatcccatgaattgctggactcatgatcctgaatctgatccaaaattagcatattgctccatcatcttgcatgaagaagatgatccgatgttgtataagatagtaaaacacggtatgaaccacatacaaaaattgtatcagtatgagacacagcgaggaccatcatcactggctcgcaactcactgattgatagtacacatgccagtgatctagtgatcaactggaatcaggagttgaataatgaagaattttttgatttgggtgatttgacaataattgcatgtggtgaaattgctcacataaaaggtcagtcccatatgaaagatattgaaaatgtggaagtatacgtttgtaagctaaacctaaagtacaacgaggagcatttcattaggctcttgcaagtagaggatatcttgtttagcgggttacaatgggagttttttgcacatgacttgcggcttggtccatattccagcttagatattacgaaaagatttaagcgtagagcaactccatattctttagattacaatttactgtggttagatagagagatatttgtcgatcttctacaattcaggagtctaataattggtaagaatggagttgaccgtttctcagaaagccaagagaagtcagacgatacgttgagactcttgggttcaatgacagaatgcgaaactcgatcagatctggaccctgtgccatcagggaaggatgaagatttttacatgtcagatactgagatatcaagaatctttggtctcgacgtctctacaaagtcatctctatctgtggacgattcatgttacagcagaagagtctcacgaacagaaactcagcaaacaacgccagagaagacatatctacataatgacggtatgacaaacacatgtaacaatactaggtaaaaaatatatataaacaaaacacaggtaacattcaaaccactatactttagtatggtgtagttccgatcatattggttaaaaaagtcatatcatgatattatgtatcattatagagaagtaaaaagcatatttgagtctatcatattcgtgtctatcattaaaaagttgtttgatgaacgtttccaaaaaatcaggaccgttcaccagttctatcattaaagttcgtgtatattggccgaccctgttacgtaaagaaatatctgcaacagtgttttcatccatcctgtgtaaaaaaatcaatcattggtttgaggtattggctttaagttcattgatttcttttcttaatctttggacctctagctcgaatagtctttcgttgttttgtaggtatagaatgtaatcgacagccttttcgagaatcatactcttgttcagttttactttctttagaggcaaagaatcttctccagcactcaagactttattatcgacaacgaacgcagtatcttcgcaagccacccatgggataatcttttgtaattttccgatcttggtattaatatttattctgtatctcttctcgatcatgttgtgagttactctttgatctgccgtcaatctctttctggagcctctcttcttattttgaggtttctgagttgcacgcttctttggtttcttaacctcttctccatcttcgatcttcacttgcaaatcattatctatttcaactgaatccagggttggtaggtctgtactctcagcagctaaaggcagctgtgtaaattgattcttttcgaaatcaaatccgttgtcaggattagtagcgttcattaagggagagttttcctcagaaacgttattgccaatggtaaaggcagtagatgaatccaaagtatcttgattgtttaacaaaagatcggaatcaaacatagccctgtattgatccgatggtgataatgaataaacggaggaagaatcagaggtccaggtatgggtgtctacctctttaccagccttgtccaaccaaacatccgctgtaggtggagcgacaaaccaattctcaatattagaaccttgagtagcgaacatgttggtgttcttgtaaccttcttgctgctgttgttgttgaatagaagccattgtaatagtgtattatctgtgtatttgagtcctgttggtctatgaggacttaaggtataccagaagtatgtaaatatatatacaagaataaaatggaaacaatgtatgtagtaactaattatcaaactggtctatcaaatccaacgtggggctatatatgaaaaaagtagacttaaccatgctaatatatatgatttcaaacaaagacacacatatacaattatagaaccactatgcgtagaaaatagattaattaagcaaaagcaagaaaaatcagatttaatgataccactttcatacccaatacaaaaacaaaagcagatcttgactattctagctcaaagcggaacccataatcaccctctcatgtcctccccttttgcttcctaatgttacagcgacaagaagatatacattcttgctctacgtttgagaaaccagaagttgcgaaaaaaaagaaagcagtgggtgattaaagaagcatgccaaattaagagatatcgcactgcccgtaacataccgaaatatcacacgcacgggaaaattgaagacgacattttcaccactagtttcgtgcttatgttcggtaccacaatgcaaaccgacaacagaatatgcctgagtagtggacttcctccgtgcacacaagagataaaattaaatcaaaagaagactctagcaaggcgtgccataatccacgatagaatcctggaaatcgtcttacacttaaagtagtagtaactatacgtaaaatagccgttgccaatgggaatggaaatagcgcctgcgcaaattatgaggattttccggcgaccattccttatccaacagcgatgttccggctacagaagtatattagaaaaaaaattcctgcggctacattgtatgtgttgtaaaagaagaaaagagagaaagcaaaaaaagaccaacaaaaacttggcgaggggaaaggggaaaaacgtattatagttcacattccagcccattttcaaactggtcgttaggaaatacgtatgttagggtgcacccattctggaaacgctgcctatatctttcgtggacgggaagaggataaggaacgtttcatcttaactcctgccagcttccgctcatggacagtgtgtttttgggttcatccgtaggggaatggcaccacttagtgctctggcgtgcgttttaatcctgttcaacatgcttttcagtggaagggtgtgaaaagggccaaacatgcaatcgccgcagtagataaaacgtcggataaaccttacataggaagctcaatgaatgggaaaatattatgctcagaatgggaattttgcgtcaagatgcgtgggaagtggtgtggtttttcctactgagctttctactgagtatttccagctgctcatctcggaaaaactaagacaaaaaaaagaaaatagaagacgtacaaagtgctttgcggaaaaacattttgtttttctgctgcgtgtttgtctttggtttttgggttcagattcggataaacaaccgtcgtttattgcatgctttctatcgcttctacggcaaacctgtgcccctggtatatgtggcaccatacgtctcccaatagacacctttcaattttcatagcttagcgaggggttggatatcaacaacaataaccggactgtttatcttttttttattgatctaccggttcttttagaacgattacgtccaactggtcaacgtttttgtctttgtatggtgaaaatcttgaaaaaaaatccacttagaaaaaaaaaggaagcagtcaaacatttttccccctggaaccattttttgaagctttacaaaaagagtagtagaaaatatgggaagaggttgaatattactgtgatttgcttggtaacattggtttcccgtcgtgtctgtgcgtgtgtgtatatcggtcattgtctgatttcaataacttataaacaaagttagggaaaaatcgagactacgcggactctgaacagcggaggagttctacacatcaatatacggacacaaatgtacttctagaaagtaccttgctataacaatagtgtatctatcagattccagcccttgtgttatcaataatcagcttgagcatttattttccttttgtccttatctggtcattgacggagacttcagagttctggactggttttactcataactccgaatgccatgaacaataaagaggaggagcaagacgtaactgcaagtttcaacagaaatgaaccagatatagcatcctcctcgagtgttggatattcagggtatggagaatattttcataataaggaacttcaacagttggaaagtgatgttcaattcagacagaaatatcaaaaagaacatcgagtttcaaatcctacactttttcaagggtgtactatctatgtgaatggacgtacgaatccaactcgatttcaactccataaactaattattttacatggtgggactttcaagcattaccttagtgggaagactgcagtcacccatatacttgcaacagagttaaatgcatccaagaaatcatcttttgccaatttcaaggttgtcagccccgaatgggttactgagtctattgctcgagggaagcttttaccatggcaagactttagaattgtccaagtttccagattacagggaaagattacagatttcgcaacagtacggaactgtatggatccgaacttcattaatgcttttttcaaatcctcaagactacaccatttatcgaactggaaattccagttaagagataacttcgtgaaagaattcattttgtcatataacgacacaattcctgatcaaaaatatgtgtatttccacattgactttgattgcttctttgcccaagtgtctgctaaaatcgatggtaaatacgatatacatgccacacctatcgctatttctcatggtatcaacaattctgatatatccagctgcaattatgtggctcgttcttttggtgtttataacggtatgtgggtatcatctgctttgaaactatgcccggacttgaaaatattagattatgaatttgatgaatatgaagcaatttcaaatttattctacagcgctctaaaagatattggaatcttcaaaatggtattgccaatttctatagatgaagcaataggttgcatgttgattacccccgatattacctctgaattgttaactcaaaaatgcatgcaagtgagaaatgccgtctataatgttactcaaggatactctgtcagtgttgggtgcgggccatccgtattgctagctcgtttagccctaaggaaagggaaaccaaacgggttccatatttcttggtttgatactgttactgaatgccatgcattcatagatcactttaagttaaaagatcttcctggtattggttatagcacagatctgaaaataaaagaacaatttggaaatgttcaaaacatctctgacttaagagatcttttagaaaggccaagcaacgtttctaaactaataaaagtgattggttccaaaaataccaagaaacttcagatttaccttgatggtaaagatgacgacgaatccataagtatggtaaaggatcctcatacgtactttcaaaagaaatccctctcagtagaaataaattatgccataaggtttaagaccatagacgatgttgatattttccttgaacggctcgcactccatttatgggaaaaacttagggattcaaatttaatgacaagacaaataactttgaaattaatgaagagagctcaaggcgcacctgtagatccaccaaaattcatgggtatgggtaaatgtgacgctcttagtaaagtcagtaacttaggaactaatacacaaaaatttggtacaattgcttcggaatgtaaaactttatttagaatcttaagtgttcctccagaggaagttagaggaattggtattcaatttcacaggttaactgattcgaaccaaaaagtggggcaaaagtcggaacaaagggaaattacgactgatttatttagaaaacgagaccatccggatgatgacatcactaacgaaccctccaaagtagccgagccacatactccagttaacccaacatatacttctcccgtaaaaaactattgggatcgccatctaaagcgaagtatcaccccatttcaatatgactttcctgaccaactcgatcctgaatttatgtccaatttacccaaagatgttcaagaagagattacatctcatcataaggttgttaaaaaagccaatcgttctttgagaacaaaattgtacgatgatcccagaaagcaaattaagcagacgcaagatttacacttcatacacgatgggaggcttgttccgcagctttcgttccagggattaagttctgcgaaacagatttctgaaactcttatcgactgggtggacgccacagtggaggatggcccccatgaaaaagatcttgagttattcactagctatcttgataagttagcggagcaaggcagatgtcatattatactacatttgattaaaaccataaaaaatagggttgatgatcactacaacgcgaatcatgaaggtttagagcaatgggaatacttcttgattcgtcgactaattcctatattaaataaagcaaaacctgatgtgaagttcaacttagtgtttgatttataattgaatatccatctaatacttgttgggatgaaagcatgcatgatcattgcgcccaatttttttaattagtaattactctttccatgcactcatttgtttattaattattcatctttcgacacaacgtaagtataatagtagagtacaatctaattgtctttttctttacctaaaatatatatattaattagaaaatgtttgtctatggcttcataagttgcataatcaagtctaatggtgatcgacaagattttagtccaattttacccagtatcttaaacggtcaagacacgtagagtgttggagttaccgacaccagcggcgaaaccttgaatggtgacaatggtgtcaccgtcaaccaaaattccgaattccttggccttcttgacaccgaagttgattctcttttcaacatcgacagtccattcggagtcagaggattcatcgtatacgaatgggaagacacctctatatagatgagagaatctagcagctcttgggtttctagtaaccataacaattgggacatttggcttgtacttggcaaccaatcttggagtgtcaccggtggtggataggacaatcaaagctctggccttttgttcaaatacagcagaaacagaagcagcagcgatagtttcagtggttgaggttggctttggagtcaagtttcttaagtcatcgtaagttgggatgtatgggatggcttgttcagcaatcaaagcagtttcagccatggtcttaacggcattgattgggtagttacccttggcagtttcaccagacaacataacacagtcagcaccatcaagaacggcgttaccaacatcagagacttcagctctggttggtcttgggttgtaggtcatggattccaacatttgggtagcacagataactggcttaccagccaagttacacttagcaatcaacttcttttgcacagcaaacacttgaggagctggaatttcaatacccaaatcacctctagcaaccataacaccgtcagtgaccttcaagatatcgtcaaagttgttgacaccttgttggttttcaatcttaacaatgatcttgatatccttaccttgctcacccaaaacttctctgatagtcaaaacatcttgagcggttctgatgaaagaggcgaagaccatgtggacaccgttcttgacaccgaatttcaagtcagacttgtccttttcggacaaagctggcaaatcgacatcggtacctggcaagttgacacccttgtgagaacaaatcttaccggcgttcaaagacttaaccttcaaggtgttgtcatcaataacttccaaaacttcgaatgacaaaacaccatcatcgacgtagataattctaccagcttcaatgaccttggtgatgttcttgtaatcaacgtacatggttttgtcgtcacaagccttagcgtacttgtcatcagtagtgaagatcatttcgtggtttggaggaattgggtaatccacatcgttagtggtggtaccagttctgatttcaggacccttagtgtccaatgcaatagccagaggtctaccttggtatagttcttcagattttctggcgttgtcaatgacagattgatggtattcgtaagaaccgtgggagaagttcatacgaacaatgttcataccagcctttctcaattcaaccaaagtttctgggttgttggtctttggaccaatggtacaaataattgaggttcttctcaagttggtaccagtttcggtactcaaatcggtcaaccagcctaatctagattccattgtgaatttgtattaatttctgtttgtaatataggatgctgtttctggatcagtaaattaaactcaaatggtttgattaatttattgcacagaaagtatcaagtgaatgggtctgtatgaagtaaaaataaatctaaaggttcttttaacagtaactttgactttagtttagtttcggttcttaacggattatactgataaagaaaaacataactaaaacaatgatttaagagtagaatggaaaaccagctaacaacttcaattaaccctttttcaagtctctctttatatataaactttaccatcagcttacatcaaaaccaataagagaaaacccattgaaggacccaataaatttccatatccattgcatcctgatgggaacaaactcgcacggtgtctaactgatgatgagacttctgtaggaatccaaagaaaaacctgacattgtatggattagtgcatgatgtcgggcttctggtaattggaccaactcttgatgttttaggacgccgggctattggcttcttgtattcactctttctttgtgcacaaacttcctagcttccagttttccctcgagcttatccaggcggattccacaaattgtccccccaacatcttttttttttcagaaacatttttcttttcgttcctgtacttccatcatgagtgagtgaactgaaaaactggagctaaacagatggcaatggaattcgaacaaggtgacgacaaaaattgctaacggatcatagtatattctatgaaagtgcttcaatcagttgggataggaacgaacgcaggattgcgaaaaccgttattgttgaatcttgtcacgtgatagggatatcactatttttttaacttttggctctcagagtggaccgggtacattttttttgacactttctgtcgctaagccaactacagtccacgatggtattataaatcacgtgtgtaacttaaggatgagaatagttgaacaagatatgcatgaatagtggattttacggtgaactggatgatgtagaaaagacctgaagtattaatttacatatgaataagtttactactggagtgttaacaaaaaaaggtataatacgatttataaacaattggtttctctatcttagaataaccattccaagattttttcccagaggtttcttggtgggatacgtctagcattcaattccttggtttcttcttcgatttctcttagacccgtagtgacatcgatttcggacactgaaatcatccactggctccaagttctggtgtaagccttgtgacccaaccatagaatgaggaagagcggtagagtgatgtaggcagcgatgaaatccttgtaattccaatggacaaatgattcgtacccgttgatgagacagatgatcgcgatcaggatgatgtagaaccacgtgaagtatggttggaacggtgtcttaaacggaagtctgtcgtatagattgttgaagaagacggcttttctgaaacgtaagtaagcaacacctgaacagatccaaccaaggaaaccagaaatagttgagatgttagagaaccagttgaaaacatcagcggtggatgaggagacattcaagtacgctaggcaggaaaaggctgtagcgaacgcaacaccagtgtatggaacaccccacctgttgactctgttgaatatttttggtgcgtatccttcttgggatagagataacaaggatctagtggtagcatacatgaaggagttaccagaagaccaagcagaagagagaatacacacgttgataatgtgaggcaaaactttgatacctgcgttttgaataccaataacgaaaggagatgaaccagcacctggtttgccttgacttaacgcgttaagtaatacagggtcatttctcgacacaatgacacctgcacataatgaagacacacagtagaagaaaatcaatctccaaacaaatcttctggcagccttttcaatgtttcttcttgaatcttgtgcttcagtagaggtcaagacaaccaattctggacccaagataaatgcgaaacctgcacgaatgacaccggtaataatatcagaaagtcttcctgcaccgccatcggccaaatgatacgcccaagcacctggatccttccagaaacggaaacccaatctgtcatgatttggaccaccaccgaaaaataggacgatggagactataataatacccaagatacagaaaattttcaaagaacagaagatagcttccgatgtaccatagaattccacagcagtgcaattcaatacgacaataatacccaagaaaatagtaatccaagcagccttgggtacagctgtggtccaataagtgacgacaccggaggctgcggtacattctgcggcaacaagaataacataacaataaacgtagttccaaccgacagcgaagcctaaagatgaatccacatatcttgtacatagagtagagatagaaccaccagtttcattttcatcggggagacctggaaggaaacagaccatttcagctaaagcgttcataacaggatagatgatggttgacataatacagtaagagataaataaacctgcaggaccacatttgtaaagagtagaagaagtaccaacaaacaaaccagtacctatacagccaccaatagcaatcaattgaatatgagcagatttaagacctttctttaaattatggtctccgctttgaggtttatttggtagagaaccatttttttctgagtcgttcgagtaagatgttaaatctaactcataaacttgacctgtttgtttatccacaacactggtctcgccagcatcttttaggtcttgtagattcgacataattattgtagcttcgtattgttttcacgctgtgatgagcttcaattctgctataacgatgattatgatgattcaaacagttagttcgaggctttcgcgtttcttttttccaatttcttgaagttttacaacgttgattcggtatagcgggtcaaaactcaaaatgaacaggcctactagtgtgatgttgaatgatgtaaatattataataccagcctatgttcgcaaccaaagcagaatgatagttgcagtataggttaatcgacctttaacgtctgattatttatcgtcgttggaatatcggaaatcaatatgcacaagaccataacaagaaagagtcgtaaaataatttaagagggaataacccaactccacaaaatataacatcaaacaaacgacgatatatatacttaaatgtatggatttgagacaagtgaggaatactacattcggagaagggttctgcaaagatcagacatttgaggagaatcggtaatcagcaattaaaaaaaaacacattacgaatacatatcaagtatcggacgagaggtcagattaaaaagctatcattacactgctatcaatggatatctggatagcggaacagtaaggaagaacggctaatcggtgtttactcctcatctcatatctcgctcgcaaacaggtaaaatctcctttaatcaggatgagtagctgaatatgctccagaaatactaggaacaattaaactcatctcatcagaaaaacgcccctacaacaaccaaaacaagtcgtagtcagtcatatgtattcttcttacacgccattattatttgatcagaacatagaaaaaataaaaattcctgattattacaagagatacaaagtacttatcaaatgtcactatgtcaagtcccagtagctggattcccgcccctacaattacaccgtgaagtcaatcaaaacagaaaaagcgaccttcaaagccatacaaaaaccttcaggtttttttgcgccaaacacccactgataactagtatttcgttctctatatctttaatctcatctcatcgcattagcaatcccgccaactgggtttctcaagtggacaatctcccaaccaacaaagaaagcagagccttctttcaaagggccaactcgaggggcatcatttttcaaacttgtaaacaatgacgggtgcaaacgtttctaggaaataaggtgaaataatcccggcctcgagaatgacaggacgggaactgttagtttctttttgttttggtgagagtttttttcttttttgattttatttgacctcgcgcgcggaatcttctgtgtgagcaaaaaagagagatattccgaatgtatctgttgtggacggttgagtacgggattttcctactgcttttttttggagccgcgcgcactgtgcggaggctgaacgagttcagtgggacgaggaaacagtcacgtgtatgtaagatgccatagcacccatacctttttcccgttttttaatctttccgcaaacccctgttgtggtgtgtgggcgtcctggtcagcgggaaaccaattccggacgaaactcggcggatcttgttgtcaggtgaaaagactgggaggacatgaggaagtaagggcggacgagagaagctgcgggttacccgcacatacatttgtacccactgataaggattgactatcgtaatctatctatcggtcgttatcgagaagtactcactgtacatcgtccctgttttagtcccgcatcgtatcatttcccaatctttttggtttgaccacggagttttagagtgtgtataggacgtcaactaagacggatatcaagaccccctttgctatgttccgtttccgtctctgtgtcttttgcagcagtggcaggatagctctgcgaataacactgccgctttgacagcgaagtagctcgacaaggtttaggacgttaccctttagtgataaatggttaaatcgtaagtttttaaaaagaaaggtattgcaaatactgtattgatacaaagggtagaagtttgagtatgatgtgaactagtttagttttcgaatcttcttaggagctgtcgacaagtgtttttcagatgctcacaagcccgttaaagaactgaatgctcgacaaattaaagttgccttcgagaaaaaaagacattggttgcgcgttgcatcaaatatcgaagtcacgtgctcttgttgaccttatctctgcaggatgactcttcactaaaaaacgggcttcatgaatttgaaatcaatatatatatatagtatatgtaagtatgattctggtcagattaaaaccccaaatgagaacaattgggcttgtagtgaagcgtaaacagtatacggagcatcttcgccaaatcaaatttattcattgaaatgaacacagttcctttcggacatgagttcaaagcaaaatatttcacttacctggattcagaagtgactctactcaaccatggttcatttggtactacacctacgatggtattagatgcagccaagaagagtctcgaagaacatgagaagtacccttgcagagattacttcttgacttttatcgaagaatataagcgtcaattgcaattagtcgcgaagtaccttgatttggaatataaaaactgtgcctttgtgaccaacgccactacaggtgttaacactgtattgaggtcaattccattcaatttcagcaaagataaaattttgttccattccaccacctatggggcttgtgccaacactgtgaaatttttgcacgattacttcggattacagtacgatgttatcgatatcaactacccatgcggcaatgatgtgattgtgcaagatttcgaaaaacgtttgcaaactaaagaatataaggtgtgcctctttgatatgattacttctcaacctggcgcgacattaccttataaagaactaatccaattgtgtcgtaaatatgggacttggtctctggtcgatggtgcacatgctgcaggtcaagttgattttgcatttgttaatgaattgaaaccggactttctcacgactaacctacacaaatggctttcttgccctaaatctgtcgcgttgttatatgttgatccaaaacatcatgttatgattcagaccatccccatatctcataactatacagctcctgcatgccaatatgttgagggtgacgatggacataattctaacatccttgttaacaaatttgcctttatcggcaccgtttcgtactcgtcctattttgctgtggaggaagcattgaaattccgtaaggacatatgcggcggtgaagaaaagattcgagaatatcaatgggatttgcaagaagctgctattccaaagattttggaggtttttggccaaggatctgttctacttgaaaactcgactaattctttacgttcacccggattattctgtatagaattaccgattaaatcggaatgtcaacatctcattgaaaagatgagtactgatagaatttatttcctaaactttaagagtaaatgtgataagatcatgctcgcagagtataaatgttatgcgccattccaaattaacaacagtcacttgtttattagattttctgttcaggttttcaacgaacctagtgactatgaaaaaggtgctaccattatcaaagacatcatttacggagttttggaggaagaggcaaataataccaaacgcgatgaagtgaacagtcgcttagattcgttgttaatttgagattgcttttatgtaaaatttgactaacattgataatttatgcatcttctatgtcatcgctttccttcatagattttatattttaaattgacattggattttataatcttgatttgacaacaatgaaaaggaaaaaagtaaattcaatatcatctcaatttatagacatgatagataatctcaatactaccaatatcgattgtcattccaaacactttattgcattaaagagatcttcattacagtatctttatgccatattcttgttcacttctgatttttgaagagttttaaacacaattgctaggaaaagataaacccttttattgaaagcttgcaaaagacctcaagaatcccttctcccaccacaaccaagcataacactcgaatagtatgacatcaacagctcgactctctaaagacgtccttatacgaaagctgcaacatggcatgtccgatttcaccaatttcgaagagacaataggagtgcttcaactcttcgaggttgatcctctcatactcgagaaggctttgccttcattaattaatgaattgctttcgacatattttactaccaacactgataatcggctcaagattgcacggctcttttacgagtattcaaagatattcaaaaacaaaaggatacgggtacagattcccatcaagatttatgatctgtcgaaagttttagcgctattgaagtcttctcaagattggcattctcagtatttactaattacatggctcgctatgctcgtaatctctcctttcaaatttgataatgatactgaaatccttttgattgtatcgaagttcaatcatatggctcttatgagacccttaatttctaacattaaggctgagctttggtcaaaaaactacgcattgattgaactacctgaaaaaatttcacaagtagaccccatagatctcagctacatgttaaaaactttgaagcacaaaacaacatatcccttcagcattgaacaattgatagagtttacgcaatatatcacatctctcacttcatttgataaagaaattgatgctctgtatacgttgcaattacttccgcattttgttactgttctagcaaacagagatgagacctactcttgtatttatgatattttgttctggatgacctccacaatcaatctttctttcactgacctacgattcaaattggctaaatctgtttcgaaaatagtcctctttgtctctaatattgatgaagaaagcagtgaaatgataataactgactgtgttaatgatactgaagcattgttaaaaacaaattcaaacgaatcgatggactcagacagacttcatacatttttactgattcaagcagaattttgcaggagccgacttttaacgatatctcatatcagaaaattcacgcagagtatacttccagtaattagcaaatttcaacagaagagaatgatgagcacgcaaggacatcaaataagagatgcagctaattttttttgctggagtgcattcagaagttatacgaatattgagcttcagtctctcaaaaatatgttcctcaacctattatttacagcaaactttgaccattcaccattgataagaaaatctgctatggcagctcttcaagaatgtctaggaaggcaaggaaacgtcctactagataatgtgacggttcttcgacttgcagagatgcactttggtcagctgtcgaatgcactaactctttttgagttgttcaatggaagatatgaaagttatattgatgaaatggtacagtggctagttctttatagcgttggacagaactacgattatcaattcgttgaaaaggccacttccctactttcagagatgacatcccaaatcaatgaaaaatccctttctaatatggtttcaaagtatatcaatgaaatatctgtgaagggattgaaatatcaggaccctgacatatgtgcaagaagtgtttatctacaatgcaaaattgacactgaaagtctcctgaaaagttcagacgttcttgcaattttgcaccaacagaaaatccccaaagtttggaatgaccagatttcctttcaggcattagctgagttgggaggtatttgttcattagttttggatggttctttactctcaaaacagcaggtagaacggatttttctaattgcaagacatgctcagatgaatcattcaaattatgacgatatttcgaaactattgaatcaactagtatcttttatttccgcagatagcgaaccttttgatgattcatccacagaatgctcattttgggctatattctatcagttattcagacttcaacaacctctcatctgctgcgctgcaccgtttttgtcacagaaccaatttatttccttgttttatgattcggtttccaaaatgtcttgtgagtataagggaaaaatgattgattctctttctcaggctatctctagatattctcctgatgaacatcttcagatattccttcaagatgttgtattattcttggacgactataccactacagacaaaggagatgttggccgcttgactaggctttccacagtgaacttgattctaaaacatagcatgttatttagaaagttgacttgtctcccattcattgaaaactcattattaagattaacgggagagccctctacggaaatcagactaaaatgcttcgaagcgttatgtactcttcgacatgtttcccttgagaaccctccttgcaattttaatgcaatccgactttataatctacactatagggggaacaacgaattctggaaagggtactttttttcggctggggcaattcattcgaccgatagactaatctcttccgcaatcgacgatcttcttacttattaccaaggccttgaattggctgaccgattattgcaattgaatgagtttgctcggattgttccatccgccaaagaattcgaggagctgaaagcatccaaaatgcgtaacaatatactgggaaccataccgagagagatcataaagtcaactatcacatttcttaactgctggtgtcggatgctagaatctggaataactctcgaagaagattttaactatagcggtttttttgcccgtgtgtacaatcttcaacttgctgcaaggtcagtatctgtcaccagttatgctttcaggctattaacccttcttgtctgccatcagatacttaatgtcaggaaaaactcagcacaatttgcgaataccttcatcaaaatactattaaaacaattagccgcagccaaacaaagaaccgaattttccagtattcaaaacgttgctttggaatctctaactcatatctacatatgtgctgacaggaataaaaaaattgaacttatacaagaaaactccacaactccgcagcagttctctgctctaaaaaacactgatcttttaatctagaagattacttccggacaggtgcagcattattggaatctgtacacgtttcttcgataatacgaagaagattctctaaacgaactctatcatttttatcctgtctgatattatagacgtttctggcagaagacccgttcttggccaggtacctcatttcaagttcctcaatacgctcaacagagcattcagggacaaaattttctaccatcgctgttcgcataacttcatgagaaagttcagcattaagcccattttcctcaaagaattttataagcgtagactgaatattaataacggaatgccctaatttatctgcagcagtagataaaaacatgctaatgtttgtcggaaaacaaaattcgtaagtggaaccatcacttttaagaaaacttttacaatgctgcttcaaaaaatggtagtaatagtagtaaaattcttcgtgtgtatgacctttaagggaattgttcaaaagcacagagtagtcgaatggcattaattccacagaatcggcaatctttttctgtaagaagttgaagagcaataaactggcagttttatgcgtcggtttattgctcgacattgcaggaaaaaatgcatggaagttcgaataacgagccttattagttgcattcgctacgaaaaggagcaccatctcccggtcagaaaaagcgctttccaaaaattcaataaaacattgaaaaccctgaccactggcatgttttataaataacccaaaaatgtcacatttcatcttttgattgaaattcggttttaccacacttttgaaaaatgagtaataatccctgccctgttgaagaggtggtattttggagattaaaaagtccaaattcatctcatactgtgaaaggtcaacattagaattgtttaatatagccaataccaattccatattggaatcttcgacatcgttaagggagagggtgttatgcaacggtgcataagagtcaggatataattccaaaagaagtttgttagtttgttttagcatatttcgatcaataaatgctctgaaatctgtaatggtgtctggtcttaatttaaaccccatatccgagtacttttttagtccaagattagctgtagtttcatccccagatatgagaaaccgctcaacaaagcgctcgagttcatattgaacaatgaacaaaggtaccaattcagtgttttggatgtggttcctgtaataagctatcagtttggtacgttggtcggtttcttgataaaatcttagcattgtcatatgttttacggtatgccactgaactgcagccatgtttggaaaacttgtcagaactatttccaaggccgctttaatcatcaatagtgatctgcccttagtaatcatcgttagagtccggagtagaaaggatatggaaggagatatggtattaattttagtacagtatttttgtaacaaatgaaggttgtattttgaaatagcagtgagttcttgattatttagacgattactcgtcatggacatcatcatcttattgaaaacaaagtagagctcttccggaatacctgcttcgtctttatacaacgtctcgcctgggggtttgatccattcaattttatttgtttttaggaggctcaacatatggaaagcctgtttaaatttacgctctctaagtagcacatccatatacgaagaaacagctggtaaccatagtatgtcctttcgagcaccgccattctttcccgagtctttataccatgtagagttcaaaaaagctcttgtggaatcattaagtagcttactggacccacgatctcgcaataactcttcatccaaggtttctcttaacaaagagagatatgattgatcgtatgaagaagaagcaactttttgtttagagatcgcactgcttattgattttaccttattcatgacgcaaatgcacaaacctcacacaacaaatttggtaaacagtaatgttttgctggctgagggcttacaattgtgtaaaaaataagtcgaatgttagtgaagatggcagtgaaaagaaacaaagagcggctcagtgcaatacaaaaagcataactggaaagtgccttaattctttggatgtcgtcttaagttaattttttttgtattgccaactgtatttgatatatgagagaaaaacaaaaaaaaatgaaagcgatgagcatagaaaatattggacggataaatcaagaaacaaaacactatgacacgaaaagagcgtgtaacaaagagagtatcttcaccaatggcactttatgtatatataaacaaacagattcaaagctgaccaactttttaatagcagcgtcacattaaatattgtttgaaaaaagtttcaatcgtttgttagggtttttttcgggggaaagtttgacacttttcggtagtttatgttttacaacagcaaaggtatcaatgttctcatcaatttttatgcaatcagagcttaactgtaaaactttctttttgtatattctttccaattgactagtatgtttttccacccaaacctgatgtaaagcttcttccacatcacatctattaaaagtagaaacttgtagacatttcttaacaaaactcttggcactatctgtgatagcaatccattgtctagcagtaaaatttagttttccagttctaacatttttgatgatgcttgcttcagatccatcaccataaaaaggggaaatcccagtgagcatgatgtgtgttatgacgccgagggaccaaatatcgcacttggaatcatagccgttgttgtctggatctaaggtagcagttctactgaacgatcgataaatattacgatcggctttgaatcccacttctggtgcacaatattccggagtaccgaccacagtatgcattctttcttttgtattttgagataattcttttgcaataccaaaatctgcaagaacaaccttagtacatggttctggggtatgcaagaggatattgtccaacttcaaatccctgtgaacgatgccgtttgaatgtaagaacttcaaagctaagagaatctgatatatgattatcaacgattctgtttcagaaatcggaactaagcaatcgccttttgccaaataagagaagagatcacctcccgatataagatcctgaaaaatgtatacattgccaagggcatcaacacaagattgatgaatacgaataatatttggatgattcaatttttcaagaatggtggcttctttcaccatcctagtctttgcagtgttgataacttttacagcatatgaaacagtctttttagcaacttgtcttttcatattgtggtccactttttctgctaccaagacatgtccaaaagttcctgagcccactatacgcggcacaattttccatcgatcccattccgatttaattctcaacccagtcataaactgtgacatcgtttcgcttttcactgcagagaacttaaattttgccccgtttggtaattgaatcacgtcttggttggataacaagtatgggacgtctctggataagacctgctcattgaccatcgtcccattcaatgacatatcctttatgtagcaaagtggaacgctctcgggatcaaatctgatgccccatagcacacagtgaatgttcgaaacagaaggatgttcaacagagtaaatacactcctcagtgttccgtccaagtttcaataccttattaatttcaatttggaaatgatttacgatgaactgcggcgaggagtccagctcgctctccaaatcgacttccaatactcccaaaactttgtccatttttttagcctccgtctatccaatatagtgggaactattccaacagagggagaagtggctaatgaggctcctcttaaggatctgagactgccatgctgtatgtttatatagatgccagatgtgcgcggctaaaatgaaacgacaaaaaagcgaatattaagaaaacaaacaaccaattcattacccggcaagcaaagaagaatggcccacgtgaaacaaaattgcaatccgatgacataatcacaatatgcaccacgtgactctaagatcctcttgagcacaattcaaaagaaacacataccgcaagtaaccccacttcccatatcgttcaacgtcctctccaacctctatcctctacatgcaagcacaggcgctcaaacaccaccatgttgctcgctaacaacttctaaccctctcataacccttcattaattgtcactgggaacgttccagtcagcaatgtttgcctgaacttcccctctgtatttcgaaaaagtactcacgaactctacgtactccattcatcacggccctcgaagaagcttttttccctgcaaaacagtaaagaaagaaaaagaaaaagccatgaaaaactattatgggaattactcacagtcaagttctggcgatacttttttctggcgatgctgaaatattgaaaaactgaaaaattctgaatcgagtgaaaaatttcggcaaaaagacgtgatgtgatgagccatgtcttatatatatatatatgcaccagaacagtctttgtctggtgagattttaggacacggagtttgtgcagttgattcataggatagctatttaggggagacattaagctactgttccaaaggtgatacgaccaggcaaccataccccatattgagtatgatattcaggaacaccgttgtgcgtttagcacaggctgggaaaaaagctattcctccagtgaaactagcgtacaagaatatgctaaaagatccatcgacgaaatatagaccatacccacagatcaacttggaaaatagacaatggccttcgaagaccatcaccaaggctcctaggtggctttctaccgatctaagagacgggaatcaatctttaccagatcctatgtctgtcgagcagaagaaggaatatttccataagttgattgagattggtttcaaagaaattgaggtctcattcccatctgcgtcgcaaacagatttcgacttcacaagatacgctgttgaaaacgccccagaagatgtttccattcaatgtcttgttcaatcgagagaacatttgattagaagaacagttgaagctttgcatggtgctaagaaagccaccatccatacgtatttggccacctccgacatgttccgtgacattgtgttcaacatgtcccaagaagaagctattgctaaagctgtggaagccaccaagttagttaggaaattgaccaaggatgatccttcgcaaagtgctacacaatggacttaccagttctctccagaatgtttcagtgatacacctgtagaatttgctgttgagatctgtgaagccgtaaaggctgcttgggaaccaactgaggaaaacccaatcattttcaacctacctgctaccgtcgaagtcgctactccaaacatttacgctgatcaaattgaatacttttcaactcacatatctgaacgtgaaaaggtctgtatctccacacatgcgcacaacgaccgtggctgtggtgttgctgcttctgaactaggtattttggctggtgctgaccgtgtcgaaggttgtttattcggtaatggtgaacgtactggtaacgttgacttggttactgtcgcattgaacatgtacactcaaggtgtttctccagaattagacttatctgatattaactcagtcattgaagtagtggaaagatgtaacaagattgcagtttcaccaagagccccatatggtggtgacttggtcgtttgtgctttcagtggttctcatcaagatgctatcaaaaagggtttcaatcttcaagaaaagagacgtagtcaaggtgatactctatggaaaattccatacttgccattggatccaaaggatatcggtagagactacgaagctgtcatccgtgtcaactctcaatctggtaaggggggtgccgcttgggttgtcttgagatctttgggcctagatttgccaagaaacttgcaaattgaattttccactcaagtgcaagaaaaggctgatgctctaggtaaggaactaaaggcaaacgaaattgtcagcaccttcaagtcgttatacaacctcgatggaagcgcctccaacatttctttgttagaatacaatgtttctaaagtacagggtgatcagaagagttttgttggtcaagtccagatcgacaacgaagtcgtcggcattgaaggtctcggaaacggtccaatttcctctctaatcgatgcgttgtcaaatttgctcggtgttaaacttggtgttgccaactacaccgaacattccttaggatctggttcttcaacaaaggctgcttcttacgtgcatattgcttacagaagagaaattgacaacgaaaaggcctaccaatggggtattggtatgtctgaagatgttggagaggcttctgccaaagccatcctttctgctgttaataacttgatcaaaaagggcgaactaacaataccagctcatcgtgactcagcctcagcatctgcatagtcagcggagtttatacttttcaaaagttccacaaacttgcactgtatctaccgaggtaaaatactacttatttattcgttgtatttgcgacttcgtttaccatcattttgtatttctcttcttgacaattcatttatcagtgttacaccgaagactttgaattgtctttatattatataatttatattcaattaatatcaggaatatcaccacactcaccgtatataacattgacatcatggtatatattcaaggttggaaaaattgatgtggctcttcattgcgtacattcaacatgcctttcaactgatcttctcatagtaaaaggggtcgaggtaatagtaaagaaaagtcaaaaaaaaaaagctgatcataatagaaatattgatttgattaaagatcacaagacgaaatgatagagacaataaaactgcaagtagaaacaccagatttactcttgtatcactaacaggaccacctacattgcactttgggttgaaatgcagattttagtacagcaaggtcccgagagagtaatagcactcgcttctgaaagctttgcattgttgttgaaatatgtcccaccgaaggataagacacatccggtgtgtaccattgagatggttcccaagagctatttgaagaagcagaaatttgaaaaattgagcaagcttgaaatccatggcttcattgggttaattgagttggaaggaagtattttcataggtacaattactggaaaatctgaggttgccagcccaatcccgggagaaacagtcaacaaaatctatggagttgatttcttctgtctagatagtaatcgatgggatttcgttgagttcgattctaacggatttccaatcataccagaagaagaatatgcaagctcttccaatcaacagcaacagcacccgtgccatgatttgaagaaattactatcgaacggatcattctattatagttccgatttcgatctaacatctttactacagtctagaggtctcaaccagcattcgttatccttcgataattaccaagaagagtacatgtggaattcctttttaatgcaagaaatcatcacatttagaaaccatttggacgataaagccaagcaaataatggatgatgaaggattcttaacgacagtgatcagaggttttgctgaaactttcccatcatatatcggcagaatgcccgtcaatttaactatgatatcaaaacaatcttggaaaagagcgggaacaagatttaatgttagaggtattgatgacgaggcaaatgtagcaaacttttgtgaaactgaatttattatgtattcagaggaatactgctttgctgtgacagaaattagaggaagtgtacctgttttctgggaacaagatacagctctaatcaatccaaaggttacaattaccagatctgtcgaggcaacgcaatcgaccttcgatgagcactttaagagattaatacaaaaatacggccctgttcatgtagtaaatttattatcaacgaaatcttccgaaatagaactaacgagacgatacagagagcatttcgagcgttcaaaaagcctcaaattaaactctgaaatttttttaactgagtttgactttcacaaagagaccaaagaagaaggatttgctgctgcatcaaaaatcatgcctacattagagcgctctattctggaaaatggttatttctcatacgatgttaaagagaaaaaacaattgtctgagcaaaatggtgttttcagaacaaactgtttagattgcttagacagaaccaatctaattcagcagtttatttcaagatatacatttatcttgtttttagaagatttccaattaatcaaaccaaaacttccattaatcgaagaatatgattggtatcaaaaacacaataatatctgggctgatcacggtgatgcagtttctcaaatttatacaggaacgaatgcattaaaatcatcattttcaagaaaaggtaaaatgtcatttgctggtgctctctctgatgcaacaaagtccgtcagtagaatgtacatcaataactttatggacaaaaataaacagatgaacatcgacgcattgttgggccgtctaccacatcagcattctgtcgaattattcgatccgatcaatgactacgttaatgaagaacttagaaaacaagaagcacagtttactaccactagtaacattaagatcttatgtggcacattcaacgtaaatggactcaccaagtctgtagatttatcagaatggctataccctattggcaaaagatatcttcctgacattgttgtactgggtttgcaagaagtaattgaattgaatgcgtcttcgattttgaacgttgatacttcaaagtcacaattttggaaagacttagttcatagttgcttgaacaaacatgaaaattatatcatgttgagagccgagcaaatgtcatctttgattatattattctttgtcaaagctgacaaagttggaaatgtaaaaagagtagagggttcttcaaagaaaacaggtctaggaggaatgaccggtaacaaaggtgctgttgccattagattcgactatggaagtacatctttctgcttcatcaatgctcatttatctgctggcgtgaataatgtagaggaacgtagaagtgattatgagagtataaccaagggaattagtttcagcaggtcaaaaagaattgatcaccataattccactttctggctcggtgatttaaattataggattgagttgccaaacgaaaaggtaaggagtatcctctcattacctgataatgctgatttggataaattgctggagcatgaccagctgacatcggaaatggcttcagaatctgtcttcaaaggtttcatggaaccatcaattcagtttagaccaacgtacaagtacgatcatggtacagacagatacgatacttccgaaaaagctagaattccatcatggacggatagaatcttatacaaaggtgaaaacttacaaccaatggcgtatagtgatgccaaattgaatttgagtgatcacaaacctgtttatgcagcttacaaagccaaggtcaaatttattgacgaagaatcaaagatacaaatgaccaagaaactatatatggactacaaacaatcacatcctcaagattccggttctatcaatagtgcattgcttgatcttgagctagttgacgcgaaggaggagcctaaaccggtgatttcgacagaaatgagtctgttagatctggatctacatttcgaatctgccggagtgagcacaagccgggcgatgccgccaaaaccactatcaccttcttcaagatcttcatcctcaatgagtagtctatctttgactagtccaccagttggaccaactgccagaaggggcgataccgtaagaaatggtgctcaactaacaaaagaaccggaagccgtaagaagagtgcctccaccccctccacacaagaaaccagtcataacattggattctcctgttcgaacgccgtccccctcatcaatatccacgtcagcttcggatcgaaaaatcaccctggttccaccacctccaccttccagaaagcctaaccctccacctggtttctctgatgtcatattaactccaaagggatccactcctgagcctgtagcatcacctccagtacccatagatactgccgaatcatctgcaaagaaatcaaaacctcatgttccttcaaagaaacctgaactagcaatgtccctggattcttggaaaccacttcaaccaaaatagttcaccccaacgacgccctctcttcttcaatactatcataaaagttataaatatacaactaatttatgtacataataaaaaacttagaaacatcacatttatggcgattgacctcctactgatattctacttgtaggactgcggtactgtcatataatatcttcgtttttgtttattcaacatccaccgatcatgttgacatgaaaaattcaaggctttcccatttaatatatatttgaaaaatctgtggagagtggtactatttgaacttatcaactgaatataggtgacgtagccatcaaccacatgccaatcggacatgcttcactgaacatagcaaccaagagagcgtatattcagttgccatctcctccaccagagccagttaaaagagtaaaatacgaagataatgtgctgtttgaaattaaaccagaatcgactttttaccaagtaatatatagagagatcagattgggaaacgagagatctgaaaagttcaaagaatattacaaaacagaacgctgcacgatgaataattacaaaggtgaacatattttggcagtatttttcaaaccgcattataatttcctgcaacttgtgatgcattgcctgagagatgtgccaatattcgtaattggcatcactaatggcgatgagcgatgtctggaaaatttacaaatacctatgattaccaacggtaagaatattatcaacaagatgaaaatgttggatccacttggtggtggaatgtaccctcttgattgttgtgtactgtttgacaatttgggttacgtgcagaataccatctcttggcaaaacagtggtcatgatgcaagggccttcagaaagtatttattagatgtagtgacagatcgcgatataatcatgcatttggatccatagcttccttcagtttttgttcatatacctttatttccttgtcaattttcttggtcccaatgtgaattcgatcaatctcctcttgctcaagttgtctggagaacacacaggtcggagttttgttcgagggaaataagtttcctggtttgctcattagaagctggaagaactgttccactggttcattgaaaactatttcatcaaagtatactgcttttacctcatcttcgggtacttctgactcgtcattagatctttctatttccttcgtctctgggttaatgtatggatgtaacctcaagtggtgataaaagtttaacattttctcattagatacatctgcgaaataaatctttatgttaatttcaaattcgccccatccagtttctgtcaactcgaatggtggtgcttctattactcttacagggtttgggtatgtctcatgtagcttgaatacaactttcttgatgaaatatgagatatcttcacctctgggatctctgacaaatatggtccatagatgggtatgatcttttggggcattcggaggaatgttatcacccattttcttggctgtattaccataaatgatcggtctcgttacggataacgtttttatcctttttgtcaccggtggagctggcatgttaatgtgttttggatatgactataggaaagaaaggaaaaaacgcacacgcacacacaaaacaaacacgctaaacgttgttcgaaactttcaactaggcaacgatctgtagataatacaaggctaccaatgggtccctagctttgctcttaccacttttcatccataaaagtgaatatcctgacccacataggtttgatgatgaaatgaaaatcgaaactgcatatctacctaaaaagacacaacctgatgaatttgtatataagttaggaaacagtatttttaggcatgaaaaacatatagaacagaagtagcatcaataggtctaccagagctacccaagagctccaacaagacaacaatgacattaaaaacgatttacattgcaagacatggttatagatcgaattggctgcctacaccaccagcacacccggcaccacctaccggtgtaaatagcgatgttcctttagcttcacatggtgtagaccaagctaaagaactcgcgcactatttgatatctattgataaccaaccgcaaatgatattttcttctccgttataccgttgcttacagaccagtgaaccagctgcagatcttttagaacttctgatttatatcgatagaggtttgagtgaatggtacaagccagatagagatgtgattccagagccagctacttttgatatcttgaataacttctttgcaggtaagttgaaaagtgactggccaaatagcgttattcctagccttaaaggtgagactgaagaagatatcttcaagagatgcagtaaattttggcccatattcgttaaagaattggaaaaacagttccctgaagttgaaactattctgttagtaactcatgcagccactaagatcgcattgggtatgacgctgttgaagttccataatgtcagagagtctctagatgaagatggtactgtgataagagctggcagctgttctttggacaaatacgaacttttagacgatgacgtagatgaagatgaaaacggcgatgagtctgtattacccttcgaacaaagacaatggaaattaacaatgaacggtaacacggagtttttaagcgcaggagaagaaatgcactgggatttcaaatctggattcgaagccgggtctgacgaagatatcaaagctaggcgaaagaaacaattggaggaacgcgggactacagctaacagtgaaaaggtaactgatacaaattcaagtgaagaatatgaacacgtctacgttagccttgatgttgataatcgtaattatcgtgaacggaatacggtacaaaatcaagctacattacagcactccggtttagagactgataaacctttgataaaaattggtgataacgtttacgagggtacttggaagaaatctcttggtaccgagttagcatttgctaaagagttaggcaatgttgggtccaaagagagtgagcaagacgcaggtaaccctgagcgcgtttacagagtcacagatagtatagatcttaacccaattcaacctatgtaagatatttatatatatatatatatatatatgtgtgtatatatatcaattatccggtaatagtgaatatttttttttgggttgatcacaaccagcatagagtatcgaaaggaagaacaagagcagtaggataggcaccaccactacaacgaaatatgaatccactgtcacaaaaattgactgataagtatgaaatcattctggcatcatcttctccacgaagatttgagattttaacggaacaaatgggatttgacaacataaaagtcatgaaacccagcttcgaggaagatcttgataaatccttgtatgtcaaaaggccaagcgattacgtccaagacacatgtaaggagaaggcaaagagcatactccaagaattgactccaggaagtaaatcgaaattggtattatgtgccgatacaattgtagtagaccacaccgatgagatctacgagaaacctgtagagaaagaaatccaactacgaaacctgctcagattcactcaatccgggaaaccgatgagggtcattaccgctgttactattatcatatacaacacaccacaagaatacagctttgattccttttatgaacagacggaggtatacttcgacagtaatatcccaaggtcgatagttgagatgtacgtggaaagcggtgacggcttacaagttgcgggtggtttcaaagtgcaaggtttcagtggctgtcttattaagaaggtcaacggtgattactacaacgtggtcggtctcccattaaatggtacatggaaacgcctatgcactttgatataaactatcaaatcacgtgatgaaaatggccatggcaacaatattacccgaactaagaatgaatcttaaaggaaaaagaaactaacaatgagtgccgggtaacataatttcctgcaatatgcgaaaatttgataatgaaagctcatcgcatcgcattgatctatcagtatatacctatgtaccattggaataaagagttgagtaactttgaaggagtgagcacatcgtcactttgtgggaatagtctacacatcagctatagatatataccgaaacattgcatatcgttgattacaaagttcgataagaataaagagacagttacaatggtaaaaagtttgaagtctaatcctacaagacaagccaagaaggaccaaccaaaggcttctaagaagcaagttaaggagacaaaggctttagagagtgaagatctagaagctgtctccgaaagcgacgaatctgacattgaagggttccaaagcgctagcgaaaatgaggctagtagtgatgctgggtctagtgaagaggaagaagaggaagaagaacaagatgaagaagaaggtgaacttggtgaaattgaattgaaacaaggtagccatactatcaagaagctagatccaaagaagcaaagtgaaaatgacaaagccaaggctaaggaagataagtcttctgatttatcaggaatcttgtacatctctagactaccccaagggttcaaagaacgtgagctatccaaatacttctcccagtttggtgatttgaaacaagttagactagcaagaaataagaagaccggaaattcaagacattacgctttcttagagtatattaacaaggatgatgctgttgttgcacaagaaagtatgaacaactatttgcttatgggccatctgctcaaggtcaaagtcttgcctaatggaagctcgattgataagctattcaggtacaagaagaaaccatttgtgactagtaaagttacaaaatcttccgctcaattaaagaaaactgctgatgaaaagcatgaagaaagaattgccaaactaaaggatgctggtattgactttaaatggtaagcttcattgtcctatcctccttctcctcagcacgccatgcacatgtatctctacagttcagcactacaaatacttttgtacttacacatcatgcatgtatcgtttttgtaaactagacactaaattctaataaaataaatcttagcatagggacatgcagctaccgtaatattccatcaatacctacctaaactacagagatttatgttatgtgcgatattcactccttaaaactgatgaaatctgcctaccagtttgaagcagagtcggatgatcgcatagttgattctcaataaggcgacaagcacaatccaagggcagcccgtacatttgcgtagttaagggctgagagagctctgtgaccccccgttttcaaggcgcttttgtttactgtgtatgcatgtatctcacggctgtatcggacaatttgtccatagaaagctcgtttgttggaactttttttcaccaacaaacgaagtcttctcgaatacgaaagtttgaaatttgaatcgataaaccgatccattctctggtaggaaagacagaatatatatatatatatatatattctgtctttctatattctatagttatccgtcatctgtctatcatagtttctgtctgctaccgtacaggttaatcgatctttaagaaataaatctcatatcataaggagaaatacacacttgaagagcacacgggcttacacacatattttaagatggctaaacttttaacgtataaagaggtttctgaacacaaaactgtcgatgacttgtggatgattatcgacgggaaagtatatgactgtaccaagtttgtagatgaacatccaggtggggatgagatcttagtcgatcttggtgggcaggatgccactggtccattcgaagacatcggtcactctgacgatgccatcaaattattggaaccaatgtacgttggtgatatcgatatcacatctgagccagttcttacccagactacagatatgtcttctgctgctactacgggaggagaaggtaatgggttaatgatcatcgcattgattgctgtgtttttggccattgcatactactacttcaaccaatgatgctggcaatttcatgcagctcaccagaccacttcctgtactttatttattcaacaatatggaaattgttatcgagatagatatatttgttttgtctttattggtttacatcgttccacatcatatcgaggagactatttgtaaagctatgtatattactaccgatacctgcgtgtgtgaatatccaatcagttcacatccaggggccttaataacctcaagaacgtaggaaaaacaaaggcattatttaatttaaattcaattcacatatatttatttatcttgagacatctttccaaaaacgatgcctatcacatcgccagatatttttcatttttcgtttcaacttttcaacgcttcaagtttaagtgtgtcaacaatgagaagatcaaggtttttatatacgtaccaaaacaagtgtttggcatcaaacagctgagaaaattcaacattgatatctctgttgtttctagctcgctgaattggaagtagtagggctttgctaagtgcgctctaaagggtttttgtgcgtacaagtaaatatggattacattttcaaatcgatatctaactttcaattgccttttactaccgatggtgtatctgttgtgaatatgccatttggtacgctggaaagtggaaccaggaaatcagattcattacctgttaccattcatacgtataaaactgaccaagtaccagctgtttttttaaagaaccatgttttgaaatgtaagatccttaagcttccgggtctagcgaaagtattagatgtcattgaaccatccacagataaagtctacatcatcaccgaaagaattactgctcttaactcattggattattttaacttcaatgaaaatgctttgaaacttggtatctatgaaatagcactgacgttgaacgttttacatcaacaaggcaagtcacttttcggtgcattgtgtttaggtaatgtctatgtcaacagtaaaggtgaatgggtattatatgcattggagctatcgaccagcttgaacgatacaaaccatttcacgtccaatatccagacctataacgatgttgtgaggggctatgacgattggcagttgggaaatgggtcagcttcaaacattgactccatacaactggcgaactttttcaataaacttttaacaaatagaatatcttccagctggaagccagtcatatcacagcttgcaaagggtcaaccaggtgctattggtaagcttatcagcaaaatgcagactgatgcagaaaatcctttgatatccatatacgataacctaaaggagattcatattaaggactcagcagataaagttatgatactttccaatatccaacaaaaaattactgccgatgatgcatcctttcaaaattgcacaccagggttcttggagtatttattgctaccggagttaattcaatgtctacaattacttgctgccacaaatcaaccgatatcaagtcaagtgccctttctcggcactatattccacctaacatgttctgatagtcccattatagccaatgaagacgttttccaaaaccagatcaaaccgttaatttttcaatctttcaatgtagccgacagacaggttaggttcttgctgttgttgcactttccgaaattcatgcagaaactatcagcttctgaggttgctgacaaaatattcccaacatttattcaaggtctatcagatacagatcaagttataaggttgcaaactttgaaaaacgtttcacacctcattggaaaaattactgaacgtcaactcaataacgatcttttacgtgtattagctaaaacacaagtggataaagatatcgggattagaacattaaccatattgattattacgaaaattgctcataaactcaacaaatcaaataatagatcaacaattctggccacagcattcacgaaatctttgaaagatccagaattgaagccgagattggctaccctttatggacttgaaataactctagatctgtttgatgctgaaactatcgctcagagaattttgacagtaatcggccctggcttgctagatcggaacaaacaagtccgcacaactgctaaaaaggttttccagatgtactgggataagttggaggaagaatctgcttcagtagttgaagaggataattcaacgttcattcacacagaagaattcgaaaaaatgatgaatgatgaggaagacggaaaactgattaatggatttatacagagtgtgaaattaagcactccgactcctacttcaacccctattattctcactgaagaaactgttgaggttgatccgtggaactcagcatttgatgacgaagagttcgacgacagctggaatgttgacgaacctcaaagccgtactacaaagactgatactgaagtgaaatcatttggctttaaagtcccggtgagtaaatcttggaatgacgatcttaacgaagagagcattgaaagtgaaactgccaggaaaccgttgacatctagaaggaaaccactaccgcgccaaaacaagccttcaatcttaggaaaagcaagtgcaaaaccatcaatcctaaccagaaataaatcatcatctcctattgtaacttccagcaaaaacatcaaaagcgcaaccaatattccatctaaaatgtcaaatcttgtcctcgatgatgacgatacagaggacggttggggtgatgattggtaggcagactctattaattcttaagtttatcaattagacaatagtaatgtacataaatatatagaataatattgttataatcagcaaccagcaaccagcagatagcaaatatataatgttttttaaagaacaaatcgcaaagacgttatacaaactaacgtctccagccttggtctctggatctgtttccaccgaagccgccacggccaccaccgtaaccaccaccaccgtaaccaccatcaccacggccaccaaagccacggccaccacggccaccaccaaagccacgaccaccacggccgccaccatatcttggatgttggccgtattgacccctgtcgtatcttcttagttcttctggaatatcttgtttagcttctctcataatcttgatcaaagcagcacccagagatttattgccttcagtgaagaaggagatggcagtaccagtagaaccggctctaccagttctaccaattctatgcacataatcttcgatgttgcctggcatatcgtaattgataacgtaattaatacccttgacgtctgttgaataagaatgaagttagtaagttcgttcgtaaatcgtaatggtaactatattgacagcacaagttcgaagcacttccaaatgagaatataaaatccagagggcgcaatcaacgatttattataacattagcccgcgcggcttattcatgtcagaatagtcggtggaagacaaagatttatgtaaggcttgcttatgtcgcaaatatgtacttttctttctaacttcatagaatacatggaacaactactaagaggaatcgcaaaaataaaactgaatgcacactttgcataacagggaaaccatcctgtgacgctattttatcagttttttaattctttaacctctttgttaaaatgaatgaatccttatttcattaggttcatgttccaatctactactaagcacaattaatgatacgcgaatctgatctaactcaaacgatcatgttaaaaataaagaacatctttcagcaaaattgcatcaaagagatgtcaaattgataacatgattagaaaaagtatcgaatgtccggtaattcatcacagccttcaatgcaacgagaaaaccacgttgtgtaaaagctacttcaccacacattcgaacccaacggtccaatcaaaacctgattgtcatgaatactagtaagcttgccaatctacttttaattctagagatctgaataaatcaaatcacatcggactggtcaagtctctaaatctttatcaataattgtggaagtcaaaatgaaaagtattttcatatccttttctctgtccgcaccaaatccaataggatttcgttgataaataataagaccagctcattattttttacctttgaatcgaaaacatccgtgtcattcgaataaaaaggcatatcgtgatcatttcgaaagaaatgacttcgacagttgtctaatatagttagtagaaaggtttgacgatagtctcaatgtaaactaaagttcaaaccaatgctgaaaaaattaaatttcaataacataccaatacctctagcagcaacatcagttgctaccatgataggagatctaccggacctaaactcagccaaaacccaatcacgctcgttctgagccttgtcaccgtgaatggccaaagctggccagccttcagttctcaaataagaagtgatctcatcacaagttctcttagtggaagcaaaaatgatgatcttggagtcttgatcttgagaagcggtttccaaatgcttggccaatctatctctcttttcgaaatcagtaaggacttcgacgatctgagtgattgtgtgggatgcagacaattccaaagaaccaatttgaacttgaattggatcatgcaaatagtcacttgccaattgtttaacttcctttggccaagtagcggaccacatcaaagtttgtctatcaggtctaatttgatcgacaatttttctgatttgaggttcgaaacccatatccaacattctatcagcttcatccaagacaaggtaagtgactcttttcaagtttgtcttaccaatttccaacatgtcaatcaatctacctggagtagcaatcaggatttctacacctctctgtaaatctctgatttgttgagactttggaacaccaccatagacacaagtgtttctaattctagaggaagcaccaaatttggaacattctttttgaatttgaacagctaattctctggttggagccaataccaaaacaattggaccatcacctggagatagcaaaggttgagcattaatatgaacgatacctggtaaacagtatgataaggtcttaccggaaccggtcgcagcgacaccaatcatatctctaccagacaaagccataggccaaccttggcattgaataccagttggtttggcgaaaccttcttgcttaacttcatccaagacataagatgggaaaccagcttcatcaaaacttctgataggttttggaacgtcatgaccagaaatggtcatttcgttttcctttctaaattcgataacttcactttcactcatttgagcaacatctggatgttcttggtaaaaattcttttcgaaaactggcaaatttggtagttcttcgtcccagtttggagcgaccaaatcaactctggtatcacgagatggaccacgaccaaagctacggccaccgcggaagtcattacctctgttgtagctgtttctgtcagaacctctgctaccacggaagtcaccatgagtgctgcccatgttgtttctgttaaattgatgatctcttccaccgccgaaactcattgttctctgtataatgtgtgaaataagttgcttgatgttgagaaccaaacgataaaaaaaaatgcacacttgtaatactgaatgaacgaggatcagagacaggtttgaataatgtttgcagcttatatattagtttcaaagggcgatgagggaacttgcaaatttttcaaaaagaaacaaaaaagagagaaaaagaaatttgtaccaatgtaccaatttaccaaaatggtcacgtgattacattagccactccagctacttttgccaatggtatatccaacggtgcttccaatgtgctagattaccagtagctataaacgtagaatcaatagatattatagtgtattatacaaggatgatgtagttgtgtatttaattctattctcttatatatagttaatgcgggagctggagataaccaatttctacatttccctgattctttgcgtgaatctgtcctctacagcatcacacatgtccattagatctccaagacccttgtgcaaagcctctacagcagtaattttgccgtatgtttgaattctaatgtgcaaaaagttttctgaaggatgaggaatagagtaaccacagaattctacctccgggtttttcatgatcatataacgaagcgtgttaccaagggtatgatcttcatctgttattctgaaagaagcactagtaccatcttcggaagtagcttctgtgagaagtttgatcttttcactgtccacttcttcctccacttgatcaacttgatcattttgttcagctgctagcatatcaacatcttgcttttccacttcagccatatttccgagagcgcttatgaatggtcacttaggtggtttgtgcgtacttctttcaaacagtcaataagacgagatgacctactctgttaagctgaacaatttgtcaatattgattatggttttttcgatagagagaagagggaaaaccaaatcatgctaaaggaaaaaacaaaaagcttacccggtcttgaccgggtaactgaaagaagcaagttgatgcgaaataccagatcacgtgtcacacacttcatcagttaccgcgcaatgcacaggtgttgctcatagccacgctcagggtaccacaccatagtatataaacaacggatcccgaacaaaaagcaaagtaaactaaaagaaatgagaaaatgcgaccaaagcgagacatacccaaagtcccttggcaaaaatcatcaggggaggccgttacagaattagcataacaatccgggtcaagtatcaaatatcattcacaaatcataaaacaaggacagtccgtatacctaaccagttatcagctaaagtttccatcatcacgtatagtgctgtttccaatctgttgaactaatatcatcattccacggaaaaccccttacaaaacaccgtacagacacgacaggatcaatcagttttccttctcccttcattcatcattgcatttttcaaaaaaaatacctataagaaggaaggtataaaaaaaagttttttctttttttttcaatcttggttttctcatcgttacattatcattttggaccaaagcccaaaaaatagttgttacttttgatatcagtttgttgttattggggcaatcaaaataacgatattgaatttcggtattggtactggtattattgaccattaacgtttaatatttcacaatttacccttgagatttggtgataggagatctgagtgttgcatctccgttttagtaataggtttcccgtgagattttccttttaaagcaacacgcgttacacgatgggcagcacagaaactcaaaacaatggtgctggtggtcagcgtcaagagcaagatagtgctcaaagcaaggataagatgcctcctcctcagggccaacccgtgaaccatccaaatactttgacttctttgaaccagccaccgggtagtggtcaaagacaggattctctttcaatgtatacgaatttcaatcagccaaggttgtctacggatagttcgatttcttcgtttttgaacattgataatcagccggataacagagggtctacttcacagatgggacaagtgcctagcaacacggggcaagagttaccctatactagagggttctccattgttaataacctttggaacgcgcctgcccctcatccgcagaacgatgtcgccttcactaccacaagaagacaatctgagcaattggaacccttcatgcccaagtttaatacatcaagtttctcgcaaccttcaaagggtttacagcagcaaaggcagcagtttcaacagccacagttgcaacagggacaacaatctcaatcagttcaacagcagcaatcccaacagcagcaacaacagcagttacagcaacaatatcaacagcagcaagctcagcaacaacatcaacaggcccagcaacagcaacagcaatcacaggcttcacaacatggccagcaatcacaattccaacagggaacacagaattcacaatcacagggccacctccaaggatctatcaataacgctcttggacgtccagaatcagtatcctcttcgaaaagaaactcgttgtatttccctacttctgatgcagatttagatttcttcaacacggggaaacgtaactctatcgcaatgaaaccaccattgatcaaaccaaacggtagcggacaaaatcaacaagttaatggtgcagacgatatggaagttccatttttccagggccctctatcgaggaagaattcgatcaaattcaacccggaggattttgctgatttccaattcaaaagaagggattcttctgtcagagctaccctggacaactcaaattacatgcctgctcctccaaagagaataaatgatggttctttgagccctatcgaacatcaaatggtagataatgaggacgttgaagatgtggaaacaaggttacataaacacttatattcattggtggataacgtgaaactggataaatcacctccaaagaagaaacaaaaagctactaagaaacagaaaaaggctactcagactggtaaaaaggtcaatgatgacgaacatcaacatcatcttgacaatgggcaaatgcaatcagacaacggagctcacatgcagtcgttgacacctctgaacaattccatatcatcgatggatgactctaagcctctattgggtgctactaaagttgatcaattaatgttagtgattcaagcgcgtaagaatggtgtcacggacaaagttccacgttctgctgatggttctctcttattggaatcagcaccttccatcataccacctctatcacaactagtaggtggtgttgaaaagccgaaatctaaaggcgttaaacaattccaatgtccatactgtcacaaatacttcactcaatccactcatcttgaggtccatgtaagatcgcacattggctataagccattctcatgtgaattttgcggtaaaagatttactcaaggtggtaacttgagaacgcacattcgtttacatacaggtgaaaaaccttatgagtgtgaaagatgtggtagaaagttttcacgtaagggcaacttggcagcgcataagttgacccatgacaatctgaaaccgttcgagtgtaagttggatgactgtaacaagaatttcacacaattaggtaatatgaaggcacatcaaaataggttccatttacaaaccttaaataggttgacacaaagattggcagaaatggatccaaacgagaacatttctcagaaggaacgtgaattgctagattactttgcttctatctacagaaacagtaatcgtggtattaagggaagaggtaagggtaatcaaaacattgttccgctgaactcgttcgacaagcaccaacagatggatgatcccagtgtcagagtagccgctaaggccttaggctccctgactcaatcaaagcaaccttcgccaatgacatacgaaacaacttcaaactcctctatacctgacaagaacaaccaattttcttttcaagacaatgaaactcaattggatgatgctgcatacgctgctacaggtgctcttggcttaggaagcaggaacaccaaaaccccttcacaaaaggagaaggttcacttcaaggacgtcaatttcatcagatagttaataactattgttaataccatgaactttcacgattttcaccccatgcactttcaaaaatgaaaatatttaaataaacgattcaaccccagcataatgaaagtaaattgccttcagtgatttctcaattccccagttgttttttaaaagctcaatttactctattcttcattcttcaatcctcatcacggcgatgtggtgaatatctcggacattatttctcttttttttgttaatttaacagttccccaggttattagttactagaatttttctaaataaataactctaaaaactttgtaatattttaaactcaaatctgtattcattgactctttttcagtgtacaaactaaaccctcatcacaggtgatacagcacattatcctgattcgtccttcccatatcccttctcgattatgaattttatcctgttatattgtatgttatttctcagtgccacgcgcatttttttttattttcgtgtaatgtaaataaatcaaaaaagatggattataggatatataccaacgtcgaactgagggtcaattatagatagacactgacgtatatttggtactttctaaaggtgttttatgtcgagcaatacattattgttaaagagcaaactcccagtacgaatacagcgacggtagctgcaagatacaatcagtacaatgttaaaaatgttaccgacttcgactcttcctgcaagattttctgtcctccaggtgaccaacaagaaatccttcaagagacttgatcagagaccactagatgtattccaatattatttacagctgcaaatcgacaggcttaatattattgctgattataaagatcataggagtcatattcctttggtgaggcgaataagggcagaatgggaatcattatcaatcacgaaaagaagggtttatcatgcgttgttcttcaaattcaataagatcgatttcagaaaattaggaaacgaagaactggcaaggtaccttgcaatatcgtgtcctatttcaagtgcatatcttttgtttcgctcaaaatataaactacagtttaatctaatttgggaacagaggtacataaaacaagaagaagctccaatgcaccgtcccacgtacttggaaagacatactccacttatgaaaataatatctcattcacagacaaaaatggattctatgcttaacgcacacctcaggtaccaagagatgtgtaaatcatgtaaaaaggtttggaaagaaaaagtcactgacgagcaaaagcagttgttgtacgacaagataaagagcagcaaggaacgtttcaatactgaaatgcaaattgaaagaaaagagttggtattattgacaaaagttttggaggactcagtcccagaagactccatggaatctctggctgactcgctctcgtaccataatttcgaacaaaagaaagaagtcaacaaccatttgctagtgtcccttccatacatacttcgaaagaaaaaataaaacataaactactcaaaatatcgcatatactgttcatatataaattgttgaataaaaatatcatataagctttgcatttcaaccaagcctctatcacctttcttacctaatcaatcctgattattctggaactgatttacttgaatgttaaagttaagaccctttggaaattggccaacaggcttctttttgtcttcaggaatatcgacataggtgaatgataccaagatatcatcttctggcaccccaagagaagtgaggattcctgagataactcctagcggcacctgtatatatggcgacacggtactcaataatttttcttcatcatcgtccaatgcaaaattttgaatcggttggaattcataatcgaaaagatagaacactccgcggtgattcgtcttcaaattatctatctgtttcccatacagcagtttccagacttccttgcatatgaatctaaccattcctaacgtgtccatcgagttaaatgaaagattcgggttattgctgaaaattagtaattctgtcatcttactgcctatgccgcttccaatcttgtataatctctcggtaactttttcctttacttcatcactggcatggcaaagttgggcgattagtttgtgagaaggtacatattccagtttattcaaggatagtttgtgtatttcttcatttatttcgtcagatgttggttcaacagactgcgaacttacgctggaattttcatctaactggcttaaattattctcaactgccattgacataggcaccatttcattgagtagccattggtatgaaagagcattgaccttcggtaacgattcttgaaataataaaaactgctctactattcttcgcctttctatctgttctggagtatctaccaccggatttctttgtggatttgaggatgacatctttttaacctggatcaatgattcagagagtatgtatacaaagcctttgcttgatgttcctaaggttgcttctaacctttaccttatacatataacctttttcttaacttgcgtatatgtgtcatttctgttctgccaaattcgatgttgaaattgattaatttcataatttgattgatctacaatcatcgatggaacgaataacatattacaaagtcatagaaaaagacgaagcaattcaaaactcgaggagtcgagtgtggtaataccatgagtgaatcgatatctgttggtaatgaaatcaaagagggttttcctgagaccaataaatgggttcaaaacaacgtcaaatggttatcgactgtggagtccttttaccatgaaagatctaagcttgaaaaggagtacagtgaaaaattacgtcaattgaccaaggaatactttgccaaaaaaagcgctgaaactgttgctttatctgttggtaattctccaactaccacacccggttctcttgaatgtgcatcacaagtggcttggaatgaagtcttgtctcaaactgaattaatagccaaagatcatgagaagttctcaaatgacattgcattccacatctgtgagcaattgaaaactttgacgaaccgatgcaatagcctagtgattagtgctgaaaagttgaatgctgaagtttctggaagaaagactacatgctatgaaaacttagagaaagctaagaagagatactacgattcttgtcaagttatggaaacagccagatcaaagagttctaaatccagctctgaaaaggcgcagagaaggcaagctgaaaaagagcatgaaatgaacatcagcaaaaatgactatctaactaaaatcaaccaagccaatagagtcaaggacaaatactttttccaagatgtgccagagatcttagatatccttcaagacatcaacgagtcgagggctgccatgttaaatataatatggaataaagcaggtgtcttagagagagaattgaataaaacaattgattcgagattggatgcagctgattcagtcatagccaaaaataaaccttatttggacacgtcaatgttcataaagcataacatgaaatcatggaaggaacccaaagattttctatacgaaccttcgagtgtatggcacgatgatgaacattttgttgttaactcccaggttgaattacaagatttgagagtgaaactagcgaaggctcaacagcaattgcaacaaactcagtatcacattgaatcagagaaaaaatcattgggacagttgaacactgacaaatgcaacttaaaagcccaggaacagtatgacccgatgcaatttcaagatattctaaaaaactacatttcctctgtttcaggtttcactgcattggagcataaaaagcttgaagctgaagtggaagctgaaagtattcaaaacaacgttgctgatgattcagtcttggacacctcagaagttgatctatctcaacctgaaaagaaacacgggcttttggggaaatttaaacagaacctgacaatatcgtctaccctcaacccaatagcgacgaaaacctcaacaaacaacaattctgatactatttcaatggtatctgcagaaacacaagcatccaagaagtcgaatagattctcaattttcaagaaagttggtcgctcaaagcgaactgaatcgaccccattcgatgatgactccgtatcagttgttccctccaatgcagaaagtttcacaccatctcaagaggtgtcatacaacaatgatgacactgtgaaaaacactcctactggaattagagccaaagtactctatagttatacgaaaagtgatgctgatgaagtatctgtcaatggagacactgtcgttactgtcttaaacaaagatgccggtaacggatggtcattaattaagttggatacaggcgaacagggcctggttcctgaaacctatattcagttacaacaaagtaccactccatcaactagtcgtgcaccaccaccaagggctccacaacctagaaagagtgctcaaaagactatgaccgcagcctatccataccagtctcagggtccagatgaactttccttacaggttggagataagatcaaggtattaaaggaagatgaaggaaacggctggacgtttggtgagctaaacgggacacagggcttgttccccaccacttactgctcctaatccttataaatagctcttgtgtatgaaaatttacgtttatatttccaatttcccattatcattatttctatgctgattttagattgtaaaagaggtgttccgttgcatgtccgatcctacctatctagacgcctaaggccgactgtagttattactgatgagatttgttctttgcatataaaccctgacatcgcacttattttgatgcaagactgatttctagtttttttagctacaggaagagttggttcaaccctttaaaaaacgaatttgggaaataaaggatacattagttattgataggctttgctaataggaacaagtagttgaaattttccgaggaactgacaacagagtaccattaatctcaacttgaatatttctatattgttggttcagaagggcgtttatggataaatcatctttttcggacagttcggtagtggctagtagcagttctataaaatcatccaataaacttggcaagattggtatgcaagaaggttctaattcgccaagaatgagtgcggttcaaaacaccgaggcgcgggattcatcagaagcttcctttgagcatgaaccattattagaaggacagagatcagggaaatcttcgcatcgtaccctaggagccgttgcaccgcaaccgatcaatgtctctaattcgtcgtcgcctggggatgatttttccgacgatgattccgaattgcccagggatccttctgatctcttgtacagtgtcagacgaggttatcgaaatttcatccataaatcaaagactcttttgaatattatgatattcatcaataccttgtggttagtgacaactttcatcagtgattttttcttcaacatcaactttttgagaaacagaataaccggtttccaggacttgactcttatttttgtttcaattgttgccaacagtttaactctatggtttaacaaaattggttattattcctctttggatcagtatttgaacgtggttctttgtggattgacattgttcaacttacttacaaatttacttgtgaaatacatccgtcaacgtatcgggttattaggagtgtgcacttatttatgggctgcagtatcgtttgctgttagtgctgtcatggatcgttatctatattacttcaatacaaagttccaccctaacaattacgatgacgctgaagcagataatgacgaaaattcaccgcatcctaacgaacatagtcacaagagcatcagaaatcgtcacaccctaaccgaatgggttagtattgggtttagaacaactgttaaaggtgtgttgttagtatttttcattttgttcacattaaacaatgttcttttctctcttgattccatattgaccactaagcaggtagcacaggtttcaactgaggcaaatgcagcaagctacgatgcattccattgggtagatgctgatcacaattatcaaattcatttaaagtgttatggtgacgtatttgatgcagaaggatccgaagacgacagacaacctattgttcttttcgaacatggaggggcagatacggcatttttgtctgccacatggattcaagaactttatcatttgaacagagttcaaagatattgtgtgtacgaaaggcctggttatggtctatccgattccccacctgcaccggtgtcaatttctatgatggcagatgctttgaaacacgtcttattgaaggaggcaaacattacgggccccttcactactgtagggtatgacatgggaggccttttcactcaagtattcacagctaagaacattgatttggtcgaaagcatgcttcttgttgaatcgtggcacccagatttgctattgaagaactacatttcaagattgttaccgggggatgacaatgatgatcctgatgattatagtaaattaccagatgagatcaatagacataacggattcgttatttggtggaagggtattttatcaacgttcaatattaagttacaaacctcttggttactagctcatcacggctcaaaagagagaatttatggtcgtgatatgatctatcaaggtaaatatttgcgaatcaaattcttggagagtgtaacgagctccttattgagttataaagatgtcttgaacagcttagaaaacctaagagaaataaaaatgagtgttgtaagcagtaatgagctaataaaaaagtctcctcaatggggaaactggcaaagggagttgtccaaaatttcatccaagacacaggaatggaaaatcgtcgatggagggcaccaaatctacaagtatgggcttggaaagcagcaagcacaggacgtccttttgagattgattggtgagaaagacagatactaaatgagaaacatatgtaacatcttaagtaatgtactcctcttttctaacataccagttttacttcccattacaaaccgctttaggtacatttataccatcacaatcaccgacgaggactacgttgtaagaaaaaaaaatacggaaaatactgaaagaattgaatatatatatatatatatgactatgatatatatgtgctttaagattaataactttcagaacatctgaaactggcctgttcagttgagcatgcgaatatcgccatcgacgtcgttacagtattcgtcttcctgttctggtattggtggatgtgttattctgctatctctgttcatactcggaaagaaagatgtgccctcatcattgattggggatagtctcgacctggtatcaagagtctcgttcggtgaataaacatcttcatctacaaattcctcatcttcatcttcatcgtcactatccaagtcggcctctaaatcacaaactgctctgcagttaggacaaacaaattgaggatatgtttttgatacaagttgtctaatgcacttgaaatgccaactatgtgaacaaggtgcaatgaaaaccgcttgacaagcttttattttagataaacaaatcgaacaatcctctaattccgtcccgctggtcatcttttgcaaggctttcatcttttgaatagcttctttattgaatgcattagctttccttctccaagatttattgagctccactctcattttaacacacctgtaaatttcttccgcaccaccccggaagtctaatccgagttgtaatatatcgccgtcctttaacagaaaatccttggacatagtagctggctgagaaagtctttgatgattcaagaacgtccctgatgatgatttgacatctttcacaaaccaatttccattatcgtcaactttgaaaacaccatgtgtccttgagacgactttactcttgaatacggctggatggaacggttcgggaatagaagaaatggcctctctgaccttttctgtgtaccttccgattaccaactgagaaccaggaccagcagttcttatgatcggatcaaaatagaaaccggggttaccagccgatgagttgtctataaatgcggtcaatcttaaagtgaataatccgtttttatccttacgatttctaacagtttcatcatctgcagcttccggctgggcccaatcaggtgcaaagtctagatgcaacgatggcgctgatgctggccttactgctgggtatatgaaatgatgaacgtttttcagagcttgaccgttttgagggatggtaccgtgtataggaggggaagtgagcgggatatgatgaatatcgtttgtgttattaccaccatttccattagtctcaatttgtcccaatacaagattgatcggtaaatgatttcctgtcagtgcactatcaccaactggtgcagaaagagctcctgtcaactgcgatggttgctcagacgaatcaaacggggttgttcccaagatattattggtaatcatatttgacacaccacctacagcagcaccaggagctgactcagagactccgttgggactatttggcactgggttggacatttgcgtgtgcatcccatttcgtgtgatatctattggttgtgcaccgttactattcgagtcacctgaaagagtcccattttcaccactagttgctgcagcttgtctaatcccaaaagtacttagtatggtaccaaagccagagccacgtcttctaattgtgctgctgccagagtcattcccaacattccctaccatttcaagagaaaaaaattatgagattagattagataaccaatgggaaaaaaatcacacacgcactttcacaaacgaaggtatcgtgtcaacttgttttaaccgtctatattttgaaatagattgagctcagcaagcagagatagtatctgttactgaaaacgatatgatgagattccgtctcaaaaaccacaataaaacgaatatgtgtaaaacagaacaacgaagttacgcgaactggaaagcgccttccgggtataggattcaacaacacttggaaacagatcaccgaactcaatacagaccctgtagaatcctttatatagtcctgaaataaaaatgtagagtgctagttgtctaaacccatagggtacaaactggattttaatcaacgtaaaaagtccatttttattttttttttatttttttctgcttttctttcctgaagatttgatgatatatgacattctgcgatatgtacggaaaacatggtgctacaaattgatacatacagttgaagagtttctttgaaaaggcgtaagtgtatatgtttgatgacaatttggagtgagctgatggtgcgttaaactcacttggcttcactcggatatatacgatatttatttctcacttttcgtagctaccccagttcttttcctgttgaaatctgttccttatcatgcacgtggatatgaattggagttacagattaagcttttaaggtttgagccgatctttacttggaatgcgaaactgcccggtgcagaaacagaaacggaaacaaagcaatagcatgaagtcgagcattttgaagggtttgcattgatcgtatattttcccaagcgcagcttgggaagagagagggttttatttattttgagaataatgttttcagtacatagtgatgattcatgtatcaatgaggctttcttaagttatgcaagctgtgtgtagagtcgtcatcccttcatttcaatttggacaagtcgtatggagtagagtttacagtgatgatctcttcgtacaatagtgtagttaaaaattcgctgaatttttcaccggtgatttcaggttcgaagtatgtagcagctagctcgaacttgttagcatcaccaacaggagacttggcagctagttctttagcttgttggtaaagaatttccttagcaagtgcaggagtgacttgtttaccagtatcctttaacacaatcttatgcttgacccattggtgtagctgacaacgggacacttcagcggtggcagcgtcttccatcaagttattgattggaacacaaccacttcctctcaaccaagcctccatatattgcaaaccaatgtctaagttttgcttgataccggcagtagtaatttcaccaccttcgatgttagtgtttaacaagtctgaggcagcgacagaagtttctggcacaaaatagatttggtttggagtacccatttcggcgaaaacttcgttacagatggcagcaagagctgggtgagcaacccaggaaccatcgtgaccgttagtcaattctctaatcttatcgttacggaccttggtcatagcagcgttgtttgcttcctcgttatccttgattggaatttgagcagccataccacccatagcgtgaacaccacgtccgtgacaaatcttgatcaatctcttgacgtatgcgttcataaatggagaggtcatagtgacttgatctctgtttggcaatacatgctctggcttgtttcttaatctcttgatagtagagaagatataatcccaacgaccacagttcaaaccagaagaatgttgtctcaattgccaaatgatttcttccatttggaaagcagctggtaaagtttcgatcaacacagtagctctaatggtaccacgaggaatggccaaggaatcctgggctacttggaaaacgtcattccacaacttggcctctagatggtgttccatttttggtaaatagaagtatgggcctttaccaatttcaatcaacttcttagcgttatgatagaagtacaaaccgaaatctaagatagaagcactgattggttcgccatccaccaagatatggttatcaaccatgtgccagcctcttggtctaacaatcaacgttggcaaatcagcgatcttaccacgcaacttgtactcttttcttggagtgacaaaatcaatttgatcacgaatagcgtcatacaagttcacttgaccgtaaatgacattgacccaagttggggaagcagaatcttcaaaatcggtcatgtacgtcttcacatccgagttcaaggcgttcaccaacatatttctcaaaggtggcccagtgatttcagtggaacgatcaatcaaacctggggctaatgggggtccctgccaagtaggatcatttctgatagcttctgtttccttcaagaaattgaattcgtattcgccggaatcgatcttttgttgaacaatttgtctgttctctagtaattgtaatctggtcttgttgaaagttctatgcaatagaacgacaaattccaaagcatctttagtcaagatatcggcaacggtagtggtgcttggagagaattgaggtttggtatcgacatcaactaaaagttgaacattttctaaattttttttaaccatgatgaatctttaataaagttttctgatagtagtctgtatagagcttttatccttccctatagatttagttactcagacctttatttaacctaaaggctagaattgagcccttcagaaaaaaaaaatgtaatggcaacccaccctttatatactttatgtgacgaaaataattaatcaccggtgccaattgagtgaattgttcttcttcttcttcttcttcttcttcttcttcttctcacatccctataaacttacctagtgaaacagtatcatgtatgacacatattaccaatataataggcatttacccaagataaactcgtcatggaaatcggtctaaatggtgaaactgatttgataccaggatgatgattaaaaggaaagaaagaagtacgaaaaaggaagaggaagaaactaaaagtaatagagaaccgcgaagaaagaagagaaagaatcaccgccttaactcagtaagtgagctgccgaccaatgatgttggctcatacaaactgcggttccctcagatcatcgagcggcgccaatggcatttcaagtctatttgactctgaattaagggcaactgagctgatcatctctgtaccctttaaactcacgcaatcagtatgtaatttcgtaagattaagggatcaggttttgaaggaacggacatcggggttctccgaacgaatggagaaaattcaagttcgaaaatttcccatttgtgcgaggaagataggtgggttcctttattgcgtttcttttgcctccatcccacttcccaagttattccgggatgcgtctttgtattcgggtaacgccgtgtcacgtgttatgcttctatttcccattgtttttttttctttctctggtctctctgtttgacaatgccgccaactactgttcataacctgagatgttatccattctatcagtccctttactagaggctatatgttccgcgtcagcagaaaaaaaaatgtatattcagattgtttcagcttgagtaacgtcagcttgttgccaattgatacttttccgcccgtgtttttggctctactgttgtgcgctactacaaacaacgcggctctgcatcgccgtctaatgctaagtgtgttcagcatgttgaatgttagcatgtacgttgattttgacgttggactctcctttttgttaccctcacatcgatgtacaggaaaacaaggttttcttggaaaactaaacaaagttttgttgaaactaaaaactatcaaagaaaaaatatactttagtattagaaatgtgtgcgtattgaaatggaaggaacagaaacacccaccaaaaagctcattatagacgtgactactgcattacgcaccacgataggttttgctcattgcaataaaaaaaggaaagtaacaagaatacctttgatagaattactttaaagacactatctcattccttctcgttaaagttctccaagataacactgtaccattaaccatttaaattagactgaaatatgtcattaccgttgttacgtccgtttgagactgtttctttggagaatgcagtcgaagaccttgttgtcagattcattctcaatgttcccccggaagatttatcaacagttgagcgggttctattccattttgaagaagcctcatggttttacactgatttcgttaaactaatgaacccatatttgcccaatttaagcattaaaagcttctccaagatcgtcatagacatctgtcctttgatttggaactgggatatcacaccagaaaatgcacttgtcaagttttcaaattataagaagaccattcccgttaggggagccgctatattcaacgatagtttgtcaaagatattattgttgagaggtatcaattcaaaacactggtctttcccacgaggtaaaattggtaaagatgaagatgacgtcgcatgctgcataagggaagttaaagaggagaccggcttcgatttaaccggattcattgatgctgatcaatacgttgaacggaacatgaatggtaaaaactttaaaatctttctcgtgaaaggtgtacctgaagactttgagtttaaaccagaacacaaaaatgaaattcaagccattgaatggaaagatttcaaaaaattgagcaaggcaatcaccaagaatgaaggcagtgccaaagttttcttggtcaattccatgattagaccgttgtccttatacgttaaaaacgaaaagagggccaaggatgaaaataaattgaaattatacgccgaggaacatttgaaatccattttaggattgaataagaaggagaacaagatcgtgcttgacgcaggtcgtgagttgatggaaatgctacaaaaatctgcaaaaacagctcaacatcaagccagaaacgagacatatgttgcggaaaaccctgtggttgatgtgaatcaagctcgtagcttgtttccacttatgtccgtccaatctgtttctcacttttcttccagtaataacaccaataataacattgtcaatggtaccggtatgacgataaataccactggaaataataaattggaccacgaaaaatcgtattctacggaacaaaatactgatttacaagcctctagcaaagaactactggcatttttacacaaaagttctactgtcaatgacaaggaaagacaaatttcaggcagtgatagcgtttcgtcattcccatctgctcatttcacggagttcactgatgatgaaaactacgaggaattcgaaagttcatctgacgaaagtcaatacgaaagctctcaagaacaacttggtcattctgacacggaatgggaccccaacagagatgatgagttattaacagtgaaagaacccaaaagtgtgaaagaaacacaaccttcaaaacctgtcaaacctgaaacaaagcaaggtgccacaaacaatcaaaaacctatacttttgaaacgtccggaatctcaaaataaggctaataatattgaatctcaaaccgtgaagccaaaaatcagattattgaggcgtggtgacacattggcatcagccacacagtctccctccaatgaatctattaaagcagtctctgagaaacgaaacgatacagaaaccacttcaaacaaaaatgcagccaacgacttattgtcaatcttgaagaagccatcagaggaccaaccaaagataaacgattcagagacacattcaaacagaagtgtagccaatgatttattgtccatattgaagaaaccatcgagatcagaagtaccaggcgccgcttcgtctcctttattcactaatacctttgagaatagtcaaagtagtagttcgaacgcttcagtggaacatcatacttcttccaataacgaccgtaatggttctaatttttcaaagcagtttactgcctcacctgcactaaacgaaccatctcctaaaaatgatgcaagcgacttaatgcaactactgaaaagaccacaacagaacagtgaacctcaaagtccaatatcagacctttctccagcaagcaaaccctcaaatgaattgcttaatatattgaagaatcccaagaccggcctaaactcgcaaatatcggacgatcctgtgacacacaacacccaatacaataggatgcctcctctgcaagtacagcctcaacagcctttccaaatgcagcaaatgcagcaaatgatgccacctccaggttatcctccccaaaatatgtcatatattccccaaggcttctctcctcagcagcaattccaatatcagcaaccgattaatggatatcctatgcaacctcagccacttaacatgggacaacctgcaccaaaccaaggttttactaaacagcaagaacttttgaatatattacacaagccaaatgctcctgttcaagaaactccttccaacccttcatctgaattattgagtatcttgaaaagatgagacattacagcatttcgcaatttcacttacatatatttatatatgagacttttcatctaaggaatattttgatagttcagctgtataattgaaagagctaaatctattattgttcagaatcatctgatgggatttcatactcttgaagaaccgctgttagttctgctttatcatctcttcgtatccactctaactttctatctttcatgccagttagagtggtaatacaaccgtaacacacgcctacattcttggcaggagtatcactcattttgtttagtttttcggctttgtctggattagctgcctcccaggcattgtagttggtcagttcttcctcattatgaatcacaaatggcttgctaactgtgataccgtcaagccaatttactggattcttataaataatggcattgcaaatactacagtgcatgatttgatttagttcattatcagggttagataattttgcacctgttctaacaactgtagatatcacgtttgagtaatcaccttcaatgttatcaaaatactgtctcgcgagttcattcatcgtcatatttttgataagtttgacatttttggtaggcttgtccacaaatttgtcataaaacaaagtgtcctggacaacataattatgagagaattgcgaaagcccttttatatgacagtaagcatcaatttctgacagtaaaacgtcccggcctggatgaaagtttctgaaggcggtattatatttactatcgagggaagaatcatcaagataacctgcgatttctgcaccacgtcctttaacagtcagactaatgacttcatcagctaactttgtcatcgagtgaccccataagatggctttgaaatttctttgtaaggcaaatttcttaatcaaatgggtataaataatgttcaaaagatcttctttcgctgttttgttaggcgcgctggcaagcactttctctacagtagtacttggattatttgatgatcttaccagagtgttgaagttatcaatgtacagtgtaatttcttgcagatcaaacggcacggcaaagaattgatttctgtcaacaatatggaacagaatcttatcggagttttctttatattttgatttcagaagttcaatcttaccgcgcacttcttcaaactctgcctgtccacaaatcgtgattacttctacgtgaaatccagtttttccccggtgtgtttgtttctgctccaacaaagtatcgttcaagatatctaaaactgccaaagaagaggatcccaaagaaagcggcacgagaacattggaatcttgattttgcttatcagcttctgcctgaccacgtttcttatctggatatgagattttgaatatatcttggaagtagtcatcagacatcatctgcttcctctgtttcaaagaaataaatttcacgaaacattcatcacaaaatggttcttttctcgagactagagttgcatccagcagcttacaccttttacaaatgaccatgatagttggacgcagcgataaggtttgcaagcacgtattaacaggcttttatttgattcagtgactagttactattaagagatgagatgagatgagattgattttcttttttttttttttttattttcatttcactgtggttgttaacatgaaatttcaatctagaaattttggagttctgaaaaccatagtaaaatattgaaatgttaaaatgaatccagatgaactagtagcagatgagttactggtaaaggggaaaataaaaaaaaggctcaagctagcaacttactgccttactaacaacaaatgaccgataaacaagaaacaacacaaccagctgaaaagctgcaacagcctgaaaaggtggcagagaacgtcgaccccagtctcgaactcaataagactaaggtcaattttacaccggaaaagactgatgtcaacacctacaagttctatcctgatgatccagaatctacgttgaacagatacagatttgcagtgaaaggtgcttctgaatactacgacccatgccaggaatcatctaaaatgtctttcaagtgccttgaattaaacaactacgacagagacctatgccatgactatttcgacgcttacagagagtgtaaaaagcagtggttgaaggccagaagagagaaaagagaattttgggaataattcaaccacatctgcatgtaaatagcgtacttaatgagaagtaactttctaatcaatagcatgaattatttattgataatgagcatgatcctccattcccatattgaacgacataagctaacaaacggaacctgaataaacaaaaaaagaaaataataacacaagttgaaagtacagatcacgtgacataaaggaattgatattacccgtctttccgaatattctccattgctcctaactattggaatccgactcgcgctccctccaaaacatggtttcggaccccacatgtaaagatttcgacccaaaaaatattccagatcccaaaccgaaaaaaaaaaaaatgcagcttcccattccgatcaaacacaaatacggattattacgagcagcatcagagattcccataggtaagaagtttccgtaatcgaaaaaaaaagtagaaaagtgcaaaattaattatgatatataaaaagttttgtaaacattgagctattgtatggaacaggacgaacgaaagcctcaggaaataacactcagtagtaagcatcaataggatctagcagattttcattgattgagatataggatttagtgaaagaaatttagaatcatatcaagacgctttattttggtttgttgaatactgaaaggaaaaaaggaaaatgtcggataattctgtgagttcatttgtgactcgtaacaagaccgccatcttggcaactgctgctgccggtggtgctgctattggtgcttattattattataaccaattgcagagggcagaattgggttctggttccagtggtagtaagaagacttccaagagtgaaaagaagaagagggccgggaagaagaagaaggattcgtcttcttcatcaaacggttctgatgtcgtttatccagtagacgctaacggtcaaccagatttgtctaagaaggatgagtttactccagaacaagttgacaaatatgctttggcgttgaaggacaagggtaatgaattctttaaggccaaggatttcgaaaaggctattgaatattataccttagctatttcattgaaagaggatccagtgttttactccaacagatctgctgcatacgtctcaattaacaatttcgaaaaagttgttgaagataccactgccgctttgaaattgaagcctgattactccaaatgttggttgagaagagctagtgcttatgaaaacttgggccaattctccgatgctatgtttgacttgtcggctgtctctttgttgggtgaatacagcggtcaatccgtggagcaactgctggaaagaaacatgaacaaacaagccacaaaggtcttgggtgaaaaattgaaggagaaccagggtaaagaatctccattaccatctaacacctctttggcatcattcttcggtatcttcaaccctgaaacttctttcgatgattacgatggcgaaaatgaagcagatgttgagttgaaaaaaggtttggaaaacttgtacaaatgtcaaaccggatgttacgaattggctgatgaagaattcaccaaggctgccgagttatacaagaaagaattagaatcttctccagataatgaatctttgaagaagaaggctgccatcgccttcgaacatgtgggtattttcaagttcttcaaaaatgatccaattaccgcgcatattaacctggaagaatcgttgtctttgaacccaagaccttctacttacatctacatggctttgattatggctgacaagggtgaagccaaccaatacaaggaatactttgacaaagctttagaattagatccaaactgctctgctgtttactatcatcgcggtcaaatgcattttgttgttgaaaacttcaaagaagctggtgccgatttcgataaggctaaggaattaaatccagaaaacatttttgcctacatccaatgtgcttgcttggctttccgtgacgatagatttgatgattgtgaaactttgttcagcgaagccagaagaaagttcccaactgctccagaagttccaaacttttatgccgaaattttggctgctaagaactctctagatgctgccatcaagcaatacgatattgccatcaagttggaagatgctttaccaggtattcacgtcggtattgctccaatgattggtaaggccactgctttgattagaaacccaaccgttgaaaacttcgttgaagcttccgaattatttgaagaagcttgtaagatcgatccaagatccgaacaagccaagatcggtcttgctcaactaaaattgcaacaagaagaaattgatgatgccattcaattgttcgaagatgctgccgatctctcaagatctttcgatgaaaaactacaagctactactttcgctgaggctaccaaggtccagaaaaagatcagagctgatccattcattaagggtaagatcgacgaagctattgcagcctaccgtgctcaaggtctcgcgtaaattagcatgatattcacgaatgaatttaattcatttcaatatgagtaaagctacaatagctcattgtttttgtctcaccttaatgaccataatggcaacataccatgcaacatctaaacgaatgaattaccaagaaagttatgattttacaaacaaaaagttgtagcatttcacccaagttatttatgactcgtaagcagcgtgaactgtgttaatcgtaaacgacaagatctcaacattacaacgtgaagaataagaaatagttatcaattcttcacaaaaacaagacaaaaagaaacacagaagaacaagaatacgagaacaacgcttttcaataacagctcattgcaaaatatgtgctcctaaatacccctggttcaaaaacatcatcttctaccattttgctagaaacaaatacgtctttctgtatatacatgtatctcccccatctcacaatttaatcaaattgtaattttaaacacttcgatagtatatcactacatacgtttcaacataaatgacattttttgttttctctgaaagaagtgtatgtaataaaagtttcttgtgagattatggcaaggtactgagtgaaagtgagctacaattcaagtacttcattgttaacggactatagcaggatttaccccaccagcgaactacttcaaatatgctatcttctatctttggttcgatgatgaacttttccgctagaactggacttctgggatctaaaactaatgtttcatcgctcatcctcaccagaaacttgatgaaaacacacaaaggtgccgcaaaaagatggagaaaaacagccaatagcttcaagaggggcaaggctggaagaaatcatggtaatgctggatggagtaggaactcccttaaatcattatctggcaggtcattagcagactccacacatatgcatcgtttaaagagattgcttccataccattaagagatgaaaggcaattaaaataagatatcgtttcgatttcaatcctgtacatataacaatggcatccccataatgaatgacacaccatttcttaccatgattttcagtaaagcatgtcatgaaaaatcagcgggttactataatggataattatcattaataaatacctatatacaatttgcaaacaacggtaaaaaatgattaatcatatatatagtcaaattaagtctccgagatatcattctcgatccaactacctgtttttggattctttcttaattctaccgttgggaagtagtgatagtttgtctttaaggaaatggcaaacggaacatcgtcaaatgtcattaagcgtaacttgcagtatgtattatctgggatttctttaacaaccttcaagaatgtatccaaatcaggtgttgattggtcattgacgtgtgtgataaagttggtcacttctattccgtactgtaacgccaaagaagatgtaccacgagaaaccgcatatacttcactaggaatagacgtttttacttgacgcacggcatgatgaggagcttgtagtacgcaacctgcgaatacgacaattctagtggtttcttcaatttgtacagtttttattttcaaatcgataaccttcgcatctcttacaaccttgaataacaactcagattcgatatccgtatcgtcatcagtccccacgacaccaccaatatccctcattctttttaccagtttcccattaactgataagataatatcaccaggctcgagcctttcctttattgttgtataggagtttctggtgacactgatgaattgtaatctgttttctgattcttcttccatcatcttaatccattcttcaggaacacctctgattctagcctgcaataatgagatggaatcaaatcctgcgtccacaatagaaaccttaggattcttaccagccctgagaatatctacaacttctttgatatccactacgtctaaacccattaaatacagtttttccttgttacccatgcaggataaccagattgctctcactgtaccatcatctgccgctaatattcctgatttacatttggtgcttatattcgaatcaatggagatgacttctagattggttgctctatacctaggaatgatgtcgttaggaacactcagagaagagatgccattgactttagtcttggaactgattaaagtgtttgagtacatgtaaccaatgaaattagtttcgtctcctctttcaagcctttcattagctagcactggtgtgcatactggggcgtcaactaaagatggatcatattgaacaatagcgtaattttgggtaggatgtaagaatacaactttagcaggtacaagaatggattcagcgaacgagacaaacgtgttcaaacagtcatgaggaacaaaactacgtgaaacaataacatatcccttctcagcatcgagtactaaaccacatccgtttgtgggttcgggttccatggagtccatggtgatagcaataaccgaatgtacaacacatagactatgtgacatttttgcaagttttttattatcattaatcggtagatctaaaatcttagctttctgtggttttattggaagtggtggtaatttctcagtgatcttttcataatcccaaatacctgttttgtcatttctagtatagattcggaactcactgcaccaatgacggtcaatataaacactggttattctttgtgtttgaacatctgtcaagttatggaatttcacgattactcttttttcgtcaggaattgttttcatgacttctataaagtcgtctagagttggtgtttctttattatctacaaaatcaataacccatccagttttctcctttggatccaaatcgaacgatccagtggcacttgccacgaaaacgccttttacaggtaacgcatagcatctagccatttggtacgaaagctcatggaaattagcaccacacacctcgacataacgtgaaggagtaataatatgcaggtcaccaacagtgcatctgaaggaaatatctttggaacccctttgaaccacaatgattatctcatctcctacactgctatctagaatgttatcaacttgaataaatgaacatattggtgtgccattaatagaaattaatgtgtcaccctcttgaactttattataagctggtccctctctgagaatagcctcagccaccagcaaaccagttttacccgggaacctcttacgagcttccttctcacgatcttcacttaatccaagtcttctacattcatcgaatggtttcaatacccactgagtttggatagtacctctggtgattggtttatccgtttgtacgcattgtagagctctgacgactcgatcaagaggcaaaaagaaatctgtagaagcctccgaagagccaccggcctgtaaagcgaccgcatacccctctacagtaataactggagaaccagaagaaccacctgatgcagcagcagcagcttgaatatattcagtattaaaatcattatacgttagctcaccatagtctggtgcatttctgtcaagtctactgatgaaccctgacaagatactcaatttttcaccagcatcgttaccaacaacacggatttcagaaccaaccttggccaaagatggtttcaactctagtgcagtgacctcgatatatttcaacttcgatggatcaaacttcaagaacccaaaatcatgaactgggtcgcgatagatagggatgacatcacactcttcgtgattgtcgaaaatggcgtatccgatgaatggacctggacccacaacgtgtctgtttgttaagatgataccgagttttgcatcaacaatgaaacctgttgcttccgacaccaaggcagcttctgaatcgaaaggtgcgacttgcgagaaatgaattgagaccaccgacttaacaactttggagatagtttcttgccatttagcgttgttattgaataaagagttgcctgaatctataggtacatcgttcacttcatcatagtcttcttcataatcaatatcttcgtctacactacttgtgttctgatcgacgtcattgtcgaccctctgtttcttggattcaagatcaatgtcttcaacagatgattcgagtaggtttcgcttcaactcaacagtcatttcaccagttactcggtacgtacttcgcagttgattattcgaagagtaatccgatctccagagttctgacagacggtaatgtctctcttcaattcatctcatctgcgctctctatgtttagttatcttcttttttttcatcttgccgttcccttcggtaaacgtcaacgtgaaaaattcattagaaaggtaatgaaaacgtattgaatgataaatgcgaagatggggacggtgagaagaaaggtatcggaggaaaccattcatgtgccatctcttagactgaggtcgaccataattcttcgtttccagtttgagtattgctcttctgatacgacttcatattcgtcttgtaacatgctgcctattctgacggcgatagcgttatcgaaatccgatccatcgtaataatcgaacttgacacggagttctcggtaccatttctcaccgtctattagttcttttgtgatcttgatagcttccatgatatcttcatcatttgttgttctcatttgtgccgccatcttcttcattagcttgttatcgattgtactgtcctgatttctctgttggttgaagacaacgaacgagcaaagaagtaccagaccacaaaccaactgtgtaggatacgctaggtaagtagcgttgttattgaattcggaaattatggtagctgttacttcttcaggaagttcaaattcattgcacagagtcaccagttcagcggtagacggtctatagtattttttgtatagcatgttccattcgttatacttacctcttttctttcttggtgaaggcgtgtatttagaaggggagtcacgaaagggtgactgtcttaatggagattcaggatcatcctcaactgatccaaacacttgtggtatattgatcatatcagtcttattcttcggggttgctaatatgggcaacggaaggccattttctgtatcagcttcaaacactaatttcctccggacacttgacctactccctttgctaggtgaaagatcaacattcttcaagggctggataccacttttagttcttgatttcgacggagtctggaatagctgttcttgtaacgacttcggatctatccctgtgaatcttgcatttttaaccgctgactttctaaccgatggtgatgcagtatcatcaaacttcagcaattgtccttcggtatccttttgcggcgaatgaggccatatgtttctcttaaatatattcacaagtttggatacttggtctggtggaagcgggatcttctcctgagaatatggtaggtcattgtcatacttctcagctagtttctgaaacgcaatcagtgcacatatatggcaccgagcaagttcctctgaattcttcagcatcactttcgatactgaaacgttgtataatgttgctgtagtagaagccactttctttaaccgttggtcttgccagtcaacattagaatcatttttgacccctaataaatcggttacacacgttcgtacttgctgcgtagacatcttaaattatttccacggattcttagcactctaaagtgactaaaataggatcatctactcacttgttgtattacactggcccggaaaagacatatatctcatctcatctccatggaccatttttaacataatattaaaaacagtctttatgtagctttttgatctttttctgattttctcgattttctccaatattgaaacaaaatatggtaaataatgaaattgaatattaatcaaaagtatcattattcgcttctccatctataagttcagttttggcaatacttctagtatttcatctagcataagttgctattccagcgtgtgtgtatattttagttctcatgagtgggtactataatagacagtactctcattttcatgggaataatgatcggtaccaaaccggacgatatgcatatcaagaaaatgggaataggtacaagggcttccaacggaatggatcagggaaccgaagatactcccgcgaggggtttgggtctcaacttaggaataatgagaacgaatctcgtccaatacggtcgcagtcgcgtggtatcagcgagattcctcgtaatcccttcgcaacgcgtccagtagtgagtgcgaaatacgatcgcgatgagtttaatacaaaatatcattattacgacattgtaagtaaacgactacgaaatgaatccagcttcaagaaatggaaatctgagaagattcctgagcatggatatgtgacaacaacggagttgattgcatcggataagcaaaaaccaatactcatggccaggcagcctgaacaaacttcggtggatccgagaatacgtcctatgaatggggatgcggtctctgggtccatttctgcgaaaaagagatatagaaagcttagaagtgcattggtacgcaactcgcgaattccgtatgattctttctacattggtcctgaacctccaaaagaaatcatagtatacccttctgcatctaaccaacaaccaatagcagccgcattatctgaagcaataatcaaaaactactttaaatcatttggtgaaatagcgcattttgaacagttcatggatccaaatagtgcattgccattgtacgtctatctaataaaattcactggtccagtttctcaacctgatgctccatataaagctgcttataaggcatcagagaaattcaaagacgcaccttacacagtatcaggtatcaagttcaatgtcattttaaaccaaaatacagtgttaaattcaataaaggacaaactaatcaaacagaacgcagccagagtgacagaagtgaataaagcgaaacgggccattgcagagaaatcatccgggcagaaacctcaagtaataagaggagtgccatacgatttaactcaagttgtgaacaacagaccagttttgtttgttcctgcaaagattacgttttatcataggttcaatgcagcagatttcagatatcaacttcgtaagtacaattgggccaaaattattgatcactacactggcgtatatattgtttttcatgatctggaaaatgcaaaagcatgtttagagtacgaatcaggtgccttggtcataaattcgcataggactcactctcccatacaaatagaatttactttcattgaaccaaagaggagacttcaatcaaatatcactaaccaaagagatatcaataaacctcgaaagatagagtactcaagcacggaagagctattagaagcctccacaaaacaaattctcaaagatttgcataatatcattaagcgtgatatcttgagaaggcttgtaggtccaattatatttgatacgctaaatcctgctaactacccggaagttgtagaaaggcagaagaaactggacgatgagaagaagaagcgtgaggaatcacaaaagaagacaacgataaaggccaaacccgcagaatttgatattttcagtctatacggacctgcgtctaaaacaaaaaagctgaaaagagataggaaagctgatctaggcaaacgtcatttatacactgaagaatctcctgatcatcaacgtaaaaagaaacctaaggtggaacatatgtcgcatttgttaaatgatgaaatttctaccagagaagatacagtggattcactcaatgttggctcaaacggtgaaaactctccggagtcatctggatatgaatcggaagatattatttcagatgagtcgaagaaacagtcttccgtgataacaacaccggaggaagacctgcccgaaagcgctgcatctttacctgatgaaaggtccaaggaattactacagtatgaagggaaatacaaacctattgcatcagaattcccaaccccagtatatccttatgatgactttgacttgaataaatccaagcagctttctctcgataagttccagcttgctttgaaagacgaagaagatttctctattctcaagggcattgtctcagaaaaatcaaaagatattactactgattatacaccatttttgccgtactcaatgtggaagttataccaacagattgaacaaaatggaattattcgggataaccaaatagctttgaatgaaaaagaatttgattcaacgttagcttcaacgactggtagttttattgctgatggctttaagaaaattcctgataaactgaaatcttcataccttcttcatcatcggaggttggcgcaacctttgaacactgttcataatcatcaagaacagaatttcatggctttgaatggaacagaatcaacaaatcaagaggctgacttagagcaagataaccataatgcatcctcacgtttgaacagagttttccaaagacgtttccagcaagatatagaagcgcaaagagctgcaattggctttgaatctgacctattatcattaaaccaattaacgaaaagaaagaaacccgtcacttttgcaagatctgcaattcacaattggggcctatatgcattggaacctatagcagccaaggaaatgattattgagtatgttggcgaatcaattagacaaccggtcgctgaaatgagagagaagagatatatcaagtctggaattggttcaagttatttattcagaattgatgaaaatacagttatagatgctacaaagaggggtggtatcgctaggtttattaatcactgttgtgaacctagttgtacggcaaaaatcatcaaagtcgatggccgaaagaggatcgtcatttacgcgttacgtgatattggtaccaatgaagaactaacgtacgattataagtttgaaagggaaactgatgaaggtgaaagattaccatgtctctgtggtgcaccatcttgcaaagggttcctcaattgatttccttttcatgcatttcttttctataaattgcaaacgctacatagtttataacattcattttctcacgggaattcttttttttcttgaaatgagcaacaaaagttgattagtttggcaatttcaaacatgccgctaattgaaggcatcatgatctgcaacttaaagcaacatagcggcaggtgatagaatgtataggagaagcactgctctattgattccgtattttagatctagttttctgcgacgttcatctacggtccaaacaccaaaaactgagaaattgaagatttcattattgaatgatgataccttgattgaaacagaatctcttccaacttctgcaattagaaccaaatcaagtgatcgcggtggcagagagacacgtaactcgttacctccatctttacaatatgtacgcgatgttatggataaatataccggacacgtagtgctcacacagattggatcgttttatgagttatactttgaacatgctacaatatacgcaccaatattgaacatcacactgaccagtaaatctattgtttcagggaaagtaccatttgcaggatttcctttgaatcaattgaacagacacttaaaggtccttgtgaaacaatatggatatagtgtagccgtatgtgaccaattcaaacatgaaacattagttgataatgataaaaataagttcatgagaagagttactagaattgtcacacccggaacattcatcgatgaagctttcgaaaatttccaggaaaatcagtatttactcactgtacacttctccgaaaactgtatgaaaagagctgcagatttgaacattccagtaggtttgtcttggtgtgatatatctactggtgaaatatttgtgcaacaggtatatttgaaagatttagtgtcttcaattactagaataaggcctatggaagttcttttggatgaggagataatgcccgtcgaaattacgaatggtgaatggtataaggaattaacagaattgaagaaatattttatcaagtatcaaaagatgccttccaaacatcgtcctattcaatccttctttaaattgttctcaaatgcagaaggtgacattggaagatcattgggaaacttcacccaaaaagaaattgcggcactcagaaacctcctgctttacattgaggaacatcttccggatatcaacactaatctagaactcccacagaaacaacttatcacagatataatgcaaattgattccagaacaagtacagcgttggagttacattctacaatgagaaaacatcacaagaaaggctcacttttgtcgacaattcgaagaacagtaaccacatccggaactcggcttttgactcagtggttatctgcaccatcaatggacataaatgaaataaaaaatagacaatctcttgtgctgctcttcaaagataattttgattacactgaatcccttatacggtatttgaaagaaactgctgatatgtctagaattatacaaagattctcttttggacgcggagatccattagagttaattcaaatagctaagtctttgaggaaatgtaaagaaatttctgaatacctccagactaatgttcatccctcaaccaaaaaaactgagaaattgatcaaaaatataacgaaacaacttaatttcgaagatcctatcgtagaaaaagtcataagcagtcttaatgaagagtcgttaattaaacaatggtctgaaaagtatgagagggatgacgaagaaaaatttgatgccagcgaagaaaatcaagagagaaaatctttggtgatgataatgaaaccaagtgcatcacaaaaattgaaagaatactataaaagctacaacatcttgattaaggagaaagaaagcttattacaatggtacaaagattggtttctcgaacgttttaaacttaaaaacgtttcattaaaacagaaaaactccggagagttttgcatacacttgagtgggagtattgcaaatgtagttgagtttgataagtacattgaacagcagaaagattcatctcaagcacattctgggttccatgtgctccaaaaatcaagacaaactagatggataatacacgataaatgggaaactttgtccagagaaattgaagtagttggtgcactgattaaaaatgaagaagagcgtttaatcaatcaatttcaaaaggatttcatttcattgagccccatgattagatctttatctcagacgcttgattatatggatgttctcacttcatttgctaaattggcaatcgaacaaaggctagtccttccaaaagtcactcaaggtacggagcttaatataaaaggtggacgtcatctagtggttgaggccagtatttcgcagaaatcgttggagagtttcacgcctaatgattgccaaatcaactcaggcgaactttgggttatcactggacctaatatgggaggaaaatcaacatttttgagacagaacgcaataattgtcattttggcacagattggatcatttgtaccttgtgaaagtgcggttattggattagtggataaaatttttagcagagtcggatctgcggacgacctttataacgaaatgagcacattcatggttgaaatgattgaaacaagctatattcttaaaggtgcaaccaatagatctatggcaatcttagatgagatcggtagaggtacgagtcgctcagaaggtgtcgcaattgcatatgcaactttgaagtatcttacgacaaataatgcctgccgtgctctgtttgctactcattttggtacagaacttgccagtacgatcaatagtacatccaatgaggagtttatcaacaatatatctttttttaaaacaggtattattggtgataactccaatttctattatgatcataaattgaaaccaggtatttgttcaaaatcagatgctattaaagtagccaaattggcgggcttccctgaggaagctttggaaattgcttctactttattggaagaaatttaagatattatatgctatatctaacgtaatgtacctatataattgttctgaacaaaattaccaaaatgcaatgaagataatcatctatagtgatttgtttaattgttgttcatagatctttcatgaggatcatttaaaggcctagaaggggtatattgctgttgagcagcagattgcccagattgttggaaatttgggaaagtattcattggttgtgacactggagtggtgtttggtgggaaaaattgtaggggcatgtttggtagtggtatattgctctggggtggaaacatttgtggctgggaagcaaacggttgttgaaactgttgctggtactggaatattccttgctgctgggcaagtggttgattaggataacttggatattgaggttgataaaagcctccattgttgtatggaggttgttgattaccatacgccattggttgagaaaattgtgggttgtacatatgtgggaatccaggcggaaactgcattggattagttggaactattgattttgaatgcggtctttcatttttcggtctcttacaagaaatttgtccctcagaactgccatcttcggtatctctgtattgacttctattttctctgatatttcttgaacgataacttactgtggacttgttactgtatggtaaaggatctttattcttgaaggcagttttcccgccagccgtattttccgaatcatcgtcattattcttgcgttttttagctagcttctttttacgtttaaactccatctccttttcgtcatcagaaaactcttgttcattttcgggcagctcttcatcgaatccgttagaagcatccgttcctttgatttgcttcagctcaaaagtgtccacccaacgggcctcaggagtaacatagaataccttggcaccaactttggttttcaaatcgttgaatctagtggaactgatttctttgtctttatcgaacgatactctatagaatggagcttgtaaagggccaaagacctcacataccggaccaaccaatgtcttttcctgtaagcaaagtatacttccttcctttaaaactctttgttcccctgaaagagatgcagtaatgatgatattgtgctcaaaagcagatttaatggtgccgatttcattaatggttgccttctcgtctataatgaagtcttcaggtaccacaggcactggttcttctactaattcgtgtacggatcgaatcggtcccgttgcagccggttcttcgtcatcagcttcttcgattaccggtacaagatcatcaccatcatcatcaccatcatcatcatcatcgcttgaagtgaagtcagagcttgagtgagcagttgtttcaggactagatattccactttcagcgttgatctccttcacttcctgttccacattgtcagtattgtcagctgtctcggttatcttggtagtttcagaagcctcagtagtctcgacagtctcgctagtgtcagttatgcttgtgacagctttagactcgttttgcaatgcctgttcaaataagtcaacctctacgccagtcatgattaatactatgagctctcagctaagtgtccactataacaacttgagttgtctttcgtcaactcgcttacctctcattaagggactacgacatatacatacttaagctcatcgaaacttttcatgcctctgatgaaattctcagattttcatttatttctttttttttcttgtggtccaacagagaattcaagcaaaaagattctccggaaatgtcatggagaaactgtcgattaaaaaaaaaaaaaaggtacagatatggataatcggaatgtaacaagggccggaaaaaccaaactccaaactgatttggtacagccgtcccagcacacatgtacaggaagcggttccaaagcgattctaaagtagttttaaatatacgaatctagtattaaattctaaaaacttataaggcttgtgagagctttgtaaggaatcgtgcccttagttaaaagtggggttaacgggtgtattgttactctcatatacaaataggcaagtggctttgtgtgaaatactcaaattaataaaccacccacaaacaataattttacacgcgcttattctgcttagtacctgaactgatcagaggccagcttctcgattgaattcaattttgagtaattcaatcgcacaaagaaatgctaccttatcatatttcttcattgacttactttgaactactattttcagctagttgaaatacagacttgaaaatggtctgtgcgtgatcataatggaaacggtagttaccacagcaatctaatgcagccatgttcatactaaaataatgatgaaaatgaatcttaaaaaaaaagaattatactactctaagataaacgcaacaataaataaggtggagtttcgatgaggaaaaggtaacgaagttagcgaatattcctcgaattcctaaaatatgagtaattgaatgacacattggtttctttttgccaaggtgttctactaagaaagaggatcggtattattttcttacgctgttgcagcttcagtgatctcctttaggtaaccgagttatatgaaataaggaattagctgaatttctttagtcatcacatatataaaagccagctctgaagaaaaaataaaaatttctggaagaacatagccaactcatttaaagaatcttctactgaacctggtgacctcatattttctgatgagaccaacagaatctaatacgtcggagattgattccatttcttctgctagtgacgtttctcatattttgtctgacccgcatggatttgtaccgaaatccaaaaagagtcaactggcagattcagaccaacgtatcactagaaggctttctgagccttctagtatcaagacagcggacacaggacggtctactatcattactggtatttcaagaactgttacgaggactttgagcacgatcaagaaggcggttgatgatgataatttacaagccgacaataacaccgacgatttaaacaaattgttggaaagaaattttgatattgatgatgcattacggttgacagaaacagctaagagaactgacagtcgttacaccaccaacactaatactaatactaatgccaatgctgttaatgctaagggttcagataaatggtttgatcaaacctctgatagtgaaggtgaatatcgatcggaagttccggttgaactagccggtgatgatgaaggccagacacttaataaagtctttaccaacaaggagaccaacactttggatcttccaccagagggaggatacggttgggtgtgttgtctttgtgtcacacttgttatgttttccacttggggttgtaattcggcgtttggtgtgtttctagcattttacttgaacaattcaagctttccaggtgctagtaaatatgactatgcattaattgcaggtatgactgtattctttgggcaagggttacctccgtttgttctcttatttatgagaatctttggtttaaaaattccaatgtatttcggtattgtgattatgtgcttgggtttcgttttagccagttatgctgtgtcattatggcaactatatttgactcaaggtttccttagtggcgtcggcatttcgtttattttcgctcctgccactaccgttttgcctgggtggtttcttaaaaaaagatcatttgcaatgggtttatcattgattggaacaggagcaggtggtgttgcatactctctagcggttaataaaatgatagaaaataccggtaatcagagatttgcattaagaatccttgctatcacttgcagcataacttgtgtagtagcaacccttttgctacgtcagagagttccaatgaaggctactgggatcagaaattggaaagcaatcaagcaacactgtaatgatatgttctcgatgcacatattcaaaaaatggacagttcaattaattgcaatgtggttcatgtttgcattatttggatatactttaatgatatttactttatcctcatacgctgttgctaacggcttgactgctcatcaaggttcctcgctaacggcaatcttgaacggtgcccaaagtgtaggtagacccttaattggatacacaggggataaaatcggtagaacgaatattactgttatgctaacgttacttttaacaattttcatgttcggtttttggatccctgctgacagttattcatctttaatcgggttttcaatatgtgtcggtctatgtattggtgtagctaatgttatgaacaccgtgctagttgctgacatcgttggaccggtagattttttgcccgcttggggttatgttaacttggtgggctctccattcatgcttgttgctgaagttattgcacaagcgttgactgaacccaactccaacgacccatatctccacactcaaatatttgcgggatgttgtttcgttgcggcattactccttatattgggattgcgggaggtgacagcaaagataaagataaaagaaagacaaacgataaatttgcaacggttaaaggattatgatgattcaaacttatcagaaaaagacaataacatcttgagagaaagagagatcaagtatgattacttacttggatcaggcatcaaaagctactttgcaagaatgttttatccaatgcatgtataaaactctttccacagagtcatctattcttttcttccgtctataaaagtagcattagtgaagtatcttacttagtttatttatttcagtattttcatcccacttcaaatccttgatataagcattgcattcattatcaaaatccttccattgatcaaccaacttctttgaaattacattgaatctcattatcgggtcatgcaaattttggttaggatctaagttcatctgaatgcaaatctcatgaatgacgttatttagctcagagtaatttagcacaaactcataactcatatccatcaataaaaccaaagtagttggatacagctgatgagtgtatgttccaagcgaagcacctgaacctgaatataaaattggatgattcaaaatatttgataagaatacagaatgagctctttttagatcctcaagatcaaatgaagaatagccgctaacatcatctgtcgtaagttctttgaagttttcgataaaatgaagatcaggttttaaaacaccgcttgagacttttaccccatttctaagcactttaactttaaccgaggaggttggatcggtatctttatgatttagattcgaaagaagcttcctaaattcatgttcaataatactctcgaaacaatatgtttcaacttttttagtgaaagattgaatctgattctttaaaacattgatcattgaaactttattcagtaaatccctaataaatggaaccctgatgttcagctttctaaaaagtttaagaatggatgaatttttttgccattcttgttcataattgtactcattctttttaattctccataagaagttgaaaattctcagataatctctgcggcttccgtgttggttgatatccattactgttgaaagaggctgatccacgagatagtctaatgtgaaaacatcccaacccgaagatccatgtgctaattccaaaattctagcatcaagcctattcaccaagagattgttatctgatttgttcaatctatttctcagagatgattgttgaattgcgatttgtagacacttcgttaaatgatggctttctaaaagttgagaaggttggttgaagagattttccgagttttgaataatagaatcaatcacatcgcttttacccattagaaggatatcttttaaaaggttgagagtctcgaaataataaaatttcgatcgtaatgtggtgttgatatagtggttaatttcaccatattgctggttaaccaattcgaaaaatttgtgatccattgaagggcctaatagcctatattgcaatgaatacttatttgcaaattttccaatccattcaacttcgctgcagcaatgttcgagatatcggagggactttccaataatgtatatttttttggccactaaagacggtataaattttggaattttctgtggcaagaataccaatcccaatggttctttctcgtcattttgaacaaaaaagtcactactaacatttgaatccagttttccatcaatcaaccaatcgcatatgttcttcatgtagggttgtaaaagacgctctaacgcatcagatgcaaatttctcgagtactggatcaccattacttttttgtaactggcatacagatagtaatccctctgcactgcttttttcaaagttttcaatatattccatatatgtccttagttttagtacttcaggatagaggtgttgatatgtaaaacataatggatcgagtggatgtaagtgggatgagaaattgttgacgaaattactataatctcgaagtttactttgaatcaatgtcaaaaatgctacttttagtgtactggtggtaacatgttttttaagatattccactctaatttgaaggtgcaagtaaagtaagcctgcttcaacgatatcatgcaactgttggctttctccgttcggaatattgctgggtattgtgaacttcttgtcttttagttcgaataaagtagagggtgttcccaacacaagatagggtatacttttaacgatatcggccctcgataccattgtgctgaaatatggatctgataagctttgtaatgtagcatcagatgaactatgttgccaagcatttcccccataggacccaattgaccttctgtccgataccttctcaaaattctcaaaagaatccgcatagacgctttccgttgttttcctttgtatattttctatcacttctttcgacattggttctctcatatcatacaactcatcgtttttgtctaaaagtgacaaacattgcagtaaatatttatgtttttcttccggacttgagagatggcacatgatgccggcaaacatttctaaatgagaccaacttttcatgtcctgattgcgttgcaccattatttttttataatattccaatacttttgtgacattttcctttgatgatgttttgatagagtagtaaaggtcctgaattaattgctgagaatacgcactgccagcagatgcaggaagcatgtgtagtacacatgtgccaaatttttggtccattattgttttttccgttaccccacagtagagataggggaagaggctctttttcacatcttttacctttcactttagcgcacaaatcgttcttgtttgttgatattttcacaaaacaatatcgatctactgttgttgtatccaatgatgtaaacataaagtgaaaaaggttgtgaaatagtcacgtgattgactttggtgaccatcacaaggattgaaggaaagacatatgcagacatacatgtatacataatatatatatcaatacagtacatgtataatacatttgtttaacttattattatgccatattttttaataaggagcagagagtagttcagcctcccttgaaaagaaagagttagagaatttgtcatcgtacccgcaatgttccatagttcttttatagtgatagaaattgtagaattgcagcatggcccgtaaagcaatttcttggccataggaatcgttgatctcgcccgtgatatccttccctgttatccagttatctgttaaatgaagtttctcatgtaagaacactccagaaatcaattccatatgatctgccctccatcttttattcttgaatggtgccaattcgtgaattatctttaatatggggtggtatatgtccagattaaagatagaatacaatgccttgaatatgttactaacattaagtggtaggtcttttagcctttgtgtctttttcccagttattttggataacactcgtaatagatacacctcggaattgagcattcggagatttaatctgtttgctttctcatttgcggttgatatctcaagagtttctttatattgaacattgtataaagaacattcactccaaaaagaatgggtaggttgtaaatgtttagagtaaattctgttttgatattgatcagtaaaagattgaaggatgcctacgcttgtcgtaatgaactttgaatcgtaaatcaacgagcaaagatactcaaatttaagaaagtggctaaccttaaaccattttaaaaggaggaaaagtatggcagaactcgattccattgcaatttcctttgatcttataagttccaattgtggttgaagctcattaatttcttcttcagaaaaatcctcttcaaggtatactttgtttgacatacaagtttcaatagtttctaatagaacatatactagagatgaaaaatggggtaaagcattagcataataatcttcgatgcgattcatggtttcaggttcctcattctgtatacctctatacgtgaatgggtccttctcatgtacctcagtgtttgtccatcctcgttcttgcaccataaataattctctttcatgccatagttgtttagtagatagttttatatgcacagattttgacaaaatttcgattgcttcttgcatgttatacggtaacactgtctcaggcaccgcaatactcagcttattactaagttcgtctaccacaccagtatcatagtcaccagaggatggaaaaaatgctggatatgataaattggcttgaaatgacttcctcgttttcaatccgttgggcgagcttgtgggtgatgccggctgtgatggtgcaggcgttgccatatgcacttgtggctctcccaacgacatgttagaactgctcctcgaacggggtctcggaatctctaaaaattgtgaaagagaattggggttgtcaagcatgctaggatatgtcggttctggaagctgagaagatggaaatcttgaggtgatatcttccctaaaagcaacatattccaatggagatattgaaagattcgaagcagaggagtctttcttttcaattttgtgatgttgaagaacaaatctcttcactgcgtcataatggctctcttcaccaaactgtaatagaagcactttatggaataaaataatgatatttcttattctcattgagagtcgacttttccaacgccaatggtctatatattttgtaaggaaaagcatcaagccagatgaatgtacgacatcaataaaatcttctacagctttggtgtgcatgcttctttgctcaatagctatattgatcataaaataagtgattgaacccgagtagaacaaaagagtattatattgttgcaaattagtgttcttcaccctacaacaatctgcatgtttcttaaagcaaggtaagagtacctttgaaatcatcatcaatagagtattattcctccgtagaatgtctaaatgatggaaataactgttcgtttcctgaaaagttccgaaagaaatatacgccagacaaagcaaggtattgatatccactgaatttacctctagctttttaccaagctctgtaataacttgaatagcgtatttacgctcttcgataaatttcgaactatcatagtttttttcaaagctcaactttgcagtctttaagctcccatagtccttttgtatgaaccattctgatagttcgtgaaataatgaattaaaatcggaagcctgccaatctaacgtaggcttggtaaatgaatgtgaaagatcacctctttcaatctcgtctgctttttcttgtaacaacttctttaatgcatcgtctactggtaaattattatcttcttcaactttgacatcctcatatgtaattattttatctttgtcattcaattcgggtgaaaccttccttagttgcttcggtgatgcttgtccgttagtatatgaatcataaccttggaaataatctttcaggctaccagaactagaactgggggagattggtccatcgatctcatcgacatttgcaaactctgaatcctcatcatcttcttccccattagcatcatcctgagtatcaataatctcactgctattgttcgcttcattagattgtctatctgtgccgttgttttcatgctgcaattcatttgaatcacccaaatgtaatttcttgctaagtaaactatccagatcatggaataaagacgtatccgaagggaaagtctggtgttcattggagagctgttttgcaaatggcggtctagcctgagtcttgctcctcaaatctttagaagacaaagacttcaatagcggagatcttgaccgctgtgtctctggcattatcgcaatccacaaataatattggattcctttctatctctcaaattgaataatcgttaattcaatgttgaaaagaaaacagctcttcaagccgctatcaatagaaaaccacgggagtagttcaggcaatacctcgcaatgtatttgaaccacaaaagtaacgttttctaaaaagtttaagtgtatagttgcaaacgttcttattctaacatgtctgattgaatgcgatgctacttttttttggattttgagtaactattcaaatgcctgaaaaatgtgatacacacaaattaaaactgaaaatctgtaagaaacaaatcgaatttgactcgtgatgttcaatcgtggaagagtgaccagcaagcttttctggccgaagccgctagtttatatttgattgcaaactaaatgagcatttctctggagaatattcttggcctcaaagttaaaattactgatgttttagaccatgtaacgcaaggaaaagtgtattcattcaactcaaataatgacaccatcactttgattgtgggcaagaaaaataaagcatacacatttgagatcattcagacctcatttatcaagcatctggaactagtaggagagaaggctaatccgtctagtttcaagaaagatcatgtaaaaccgtcatacgttgatctcgatagagtgaaaaatgcattggctaagacaatagacacagctgctaaaaaggaaatgtcaattggaaaaaatgtttcctatgagggtcaatttatatttgatctcattcataagactatatcagatatagtatggaagggaaaatccattgtcgttcttgatgagctggaaataaatccgccgtatcagcttggtagcattaaaccattgcaaggcagaactgatgtcaaatcaaaagagttgatagataagattgttgaatctgcatggaataaattagagaacgaaagaaaaggcggatgatgccggatgtcaatgtaaaaatatatagtttatttatttacagattaaaatttaacttatttcgttcggaattaaaactggatagaatacacatcgccttagatgatgcccactaggagcaatctctagcttgtccttcgattaacgtcactccgaatttcaaagtaacatccaccggatagaaattgaatcgaataatttaagacctttcccagaggttcctttaaacccatcaagttcctcccatggaatataaaactcaaatcgttcattcttaggtaaaatgtagttggagtcattatcaaggttctttgactgaagcacagattcccaataaagatttaaccagcaacttgaaaaagagcttaggtgagagacgttgtttataaattgcgaggtctttgaacggattccaaatgataaacggatatctgagaaagttacgttgatatttggaactattatttgctttgaagttaacgaccttaatgatcccttgcctgtagaacactgcttggagaataaatcgataagacccgattttccacttgagtgactttgtatcttaatggatactgttgtattattggcctttttcaagaattccgagctatattgaccaattgaatttgtaaactcgattgacaaaatcttgaattcgatggtagaaaggttctttattatttcttctcgttgtttagcttcgtatcggagaaacatttcttggtacttgagataacgtagttgagaagctatggtaactcctttactgatgcctgtcttaaacctagtgctcagaaaaagagattgtgcttcatgacgggggagctgcaagtatgtcatcaaatatgcgactaccagagtgcccgatctccctttgcccattttacagtgaataacagctactttcccccttgagacagtatctcttatatcgtctattaagttctgaagatgcaaaaaagatggtggtgaatgatcaatccatccagctctcaacaagtgagatttcacagaaattggtggttttactatttcatctgcattagatctgaatagtaatttgattccggaaacattgcaatggtcttcgagcatttttctggatctaaaagtggaagtaattttttcactcttaccagctggtggggtcacatgttttgattccaataccatggcaaaatcgtcatcagtgtagtctgaatcattcatttccgccttcaaattgtagattttccagttctttctgccatgattcgcatccaaatacgtgacaagatcaacgagactgttgcgataaaacattttgggatacttcattacaggatatgagcaaacaatgatgttgtcagtaacatacgaaacatccaaaactaatcccatattattcttatattgattgaaaggggagctgtagattgatttgatgatgtgctccggattaaatttcgataaagtcattttgaatactttcagtacaattatacttggtgaagatcttagtaacgtcaaagcgattgtccaaaatttggccgactttgaatttatagatgtagaccagtctatttaatactggtggtggggaagttgtaaatgagtttgaattgctagttttcttaaatgcaacatttgtgtcacttcagaaagtacttgacaacagtgcgacaaaaaaaaaataagaaaaaaaaaaaacaggaaagacaagtatcaggtagaatagttatattattccagtaatgaactcgcatttaatgtttcaacgatgtgatcagcaattgcgtttagcgcatctgatatgttgatatcatcatcatttttcagttcgaagagccctgtattccgtttaagctgtccttcaatgtcttcatcttcgaacatatacttatgttcgttcctgtaagatttgtaaacaaattcatcaaagtagtatggtggatcaacccaatatgaatctatagtcttgtatccagctcttgcatttcttctctttttcaaaacttcgtatggagctcgaacaaatattttgatgtcaaacttctttgttagctcttcatcgttaaatatcatgaacccatcaaccaatacaatcttaagatcagaattttgcacgatagcatatttcctcttaagagaatcccaatcttctggtgatatatcaaactttgttatgtcatcaacgttatcgttatgaatcaatttacttttgattaagccagtttcttttatttgatccaactctcttttaaatgcaggtatatccaatgcctctggacagtcccagtcggcaatctgatatttttcgtttagtggaatttgcgcatcaggcttatagaagtcatcttcgtgtaatacactacttctagggattgcattcgatgttagcttggttaaggtggtcttacccgatgatgaacatccacttatcgcgatgagaaccaatttagagctagtcattcttttctcctaaaatagtgggtttaagttgataccgcttacttcgtacgatgtagggaataaggaagtaaatatgtcccaaggagctacctcaattttccctacaaatagcttatgtgacgcttttcattgtcttgtttggaagatatgttggatctttcttatctattgtcctggctttcaatttttcatgcgaaaccatttttgaattttgtcaataaattttgagaaagttaacaatcctgcaagactttatatgataaattcgcagaaacttggtacatgagaaggcaatataggttattttgccctacttaacagctttgtggaaccctccaactgaatcgatatctgaagcatcttttcatttactcacaatgtcggaatttattaatgagaaccctgatattttagatgagaccctcctaccgtccagaaaagaagatattacaaatgaactatttggtgatgccttagggaaaatcacacatgaaagaaaaaggcagttgctgcagataggatctgtagactcgccagttttgaaaaacataggtcttctagataaactattaaaccagcagctatctttggatgagaccgtacctgatttgacagatatagaaacagcaactgaatccgatgaaaacactgaggaagaagaagaggaagatcctatcgatgctcaagaaatctacgatcttatagctcatatcagtgacccagaacatccactaacgctaggacaattagcggtggtgaacttggctgatatcgaagtacatgatacgaacggcaaggataaaatggccgaagttatcgttagaatcactccaacaattacacattgctctctcgcaacccttattgggcttggtattagagtgcggttagaacgtagtctctcgcccagatttagaatcactatcctacttaaaaagggtacacatcaaagtgaaaaccaggttaacaaacaacttaatgacaaagaacgtgtagctgctgcctgcgagaatgaccagttgttaggagtcgtttccaaaatgttaagtacatgtaaataatgatcaccgttttgattctattgagcagaaacatccaaaggaactgctgctacgggactcccacttgtccaaaccgcactctttttgtcaggtcatacagccctgatatttcaataatgaaaaatcggcatgctgaaaaaaacaaccgcaataataaaatattaaaaaataaaaatggatcccagagcaacattttgatgttagtgtttgggtatgaatcattgctgaagaaccgacgtcaaccctcaaaataactgccagtatgggtgttttcattccacattacaagctttcgaagctaaaggagtacaggtatgttactcgatcatagagatgaactacattctgtttcctttcttgcaaggaaatgatgaaaaggtgatcatgagttactaaccacatcgattaaaattgaatgaagttaccaaggtgaggacaggtcgattatctctaagtatactttgaagccattctggtctcaatttgtgaaaatttttccattatggatggcacctaatgttgttacgctttcagggtttggattcatcattgttaatgttttgacagtcttgtacttaaatccaaccttagatcaagaacagccacgttgggcatacttttcgtatgcgttaggtctcttcttgtatcaaacgtttgatgcatgtgatggagcacatgcacgtcggacaggccaatcggggccgttgggtgaattgtttgatcattgtattgatgcattgaacactactctgtcaatgtttatattttgttctgtgtgtggcgttggatataaaccgatgatacttttcatccagttcgctttgttgtgcaacttctatttgagtacttgggaagaatatcatactcacaaactatttctaagtgaattcagtgggcctgtcgagggtattttgttgattgttgcgtctttcattatcacaggtatttatggaccacagaaagtttggcacagagagctatttgcgttccaattgtttgaacaggactttgtgttagaatctatgcatgtaatgttcttcttatcaggtatcggacttattttcaatatcttatctgccagaagaaatgtcgttgagcattacctcaagagctctggtactgcagaatcaaaaacagccaacatcaaggctgctgatagaggtttgctgccatttttcatttatttcgctaccgtgtttttaactgcattccttcagccaaagtttattgcactaccgttcatcatgagtattggcctaacgatggctttcactgttggtagaatcatcattggacatttaacagatcaagaattcccaatgaggcatccactcatgtttattccatctcttcaactgatcatatgctacgtatttgtttacggtttgaaatatgattctaacgccattgtcaatgacttgaactggtttgggttcggactaactttgggtattcacggaatgttcataacagaggtcatttatgaattcacaacatatttggatatctacgctctttccatcaagcatccgaagaaggttgagtaaatctctaacccccagaacttcaaaactcgatgtccataataatatgtcattattgctcacccaccatgacctgttataaaatcatgttcctttcactagttttttaaatcatttattcacttatatatacaagctgatacgtaagaaactcgtcaaaaatactcacacattctcatcattgcagagctattgctgttttcaattgtttttatgggactggccgaagaggggggggccagttattggtttgtcatttagcatatcagtattgaacaatacttccacttaaatggcagttgctggggcacctggagaagctggggaagcaccctcaccagcagccaaaatatcattagcatccttttgtagatcgaagctcttctccatttcaatcaattgttgttcggccaagattgacaaggatagaggaacacccaataacaatgcagaggtagtcacagcccacaataagttaccactcttagaaaacacactactgaatagagagacagttccgttgtacaaaaaagagatggtctttctcttttgaggtgggataatatccttcaaggcaatcaatctttcatagatattttcatcttcataaaggtcctcatcatcgctggagaactcctcttcatcagattcatctgcttgttgaagagaatcgacagctggatcagcaagagtttccccagctgtggtttggttaataggggattcttcagtcaactcagttaattccaccattatttatattttcttggtatatgtatatttgggtactatgataaaggtaagcaacggctgtaacgaaacaacccgtaccataaagcaatcattaagcatctctcttcttcttttaaactagcatttcagttttcacgcttttcgttttgttcgattttttcaatgggagaaagacatcacctacgtactatgtgattagcagggtaacgctgttttccatcggtcataacctgcaagatgacaagacggtcagccattagacaagcgttggtttaacgatgataaaaggattgggtatatttaccatatatgtatattttattctattttacagcatttattttttacctttcttcttgaacttcctggatggtgccatctcttcgttgagaatttgttctgcactttcttgttttctcttcttgccggacttgatggccacagttccttgggatttgacagcttttgacaattctttggaagattcttcccagccctcgccagtttcatcaatttcatatttatttaggttcaaggaattgatcaattctttctgcttttctctcattgcgctgatagcttcgttccctgcattttcaaggtcatcttccattttgtcaatgacttcggcagcattgtaagacaacacttcttcgccattcatttcggcaatttcttggtccttgatttgaggtaaggttttttcaatagactcgcttaaaacttccctgaagaaattggtgaatttcctgataatcttggagaacatggcaatagtttgattggatggtaagttcaactctttcgttatgtcatcaatgcccttgtgttgcaaaccaattgcaagtagtatacacgattgtacgcttgataatgatacaccgtcacccagctttccactaaagtatagcaatgccatcattggtagaagatcaacaatgacatgataatccagtaagttgttagcatagctttctaacctctttagatcgaatggagaaaagatggaatccaattggtcccttgttaaaaccttattctggaacgatctgccctccgagtcttggtctagtgtttcacccttcttagcagattcaatgacatttaacgcttcgatggcagtgaatttcttaaagtcgaacgataataaagacaagaatcttttatggaaatctttggcaaattctgccagccattttgattcacgaccttcaagaactttaaccataacacatgtatgttcaccagtcaaatcattcgctgtttgacgtaagtaaactgggacaaatccgttgtttttccagaacttatgtaaagattttgttaaaccatatgaaacacctaagtaatgcaaaaagtgaggggtttgttctgagagtttcagaagcaatggtggcaacgtctttgcatcccttaatttgatttcatctttcaagaggtctgctttcttcaaatccctgtcatcgactctcttgattgtgtagtccttttgtaccgtatcttcattcaaatcggtgaatttaccttcgaaatgatctttcaataactccagagccctagacccataacccatagaggcgtattccggattggttgcaatcctaacaacacgggcaccactcaaaccggcaaattcttcatcttgaaattgctgtgagattagccatggaattaagtcaccaccagctctttgacctcttgccaaagaatttctgacagaatccttcgagatctcaccttccaatgcgacctggatgaccactaagggatcaggtattctgccgccatcttttggatcgatgggaggcaataaaacgaatagttgatgagcaggtgcatcactcattaattgcaagtcgttaggagaattcttgtaatgcgatgcgacataaagagccatcatcttctccagaaaattttcagaaacaggatgataagaaaatagagtatctctattgacgatgaataaattacattgagatggatgaggtgtgcctctagcagcaaatcttggatttttgattagttgaacgtccaaacaaagtaatttattcaaccatttttcaactgggtcaccaggagcgtatctgataggttcatctaagacaacttctctcaaagaacggccacttgtttgaacttcttgtttctttgaatctctggaaacaagtgctgtttcggaatcttcacggccagtaccgttggattgagttcttagctgttgaatcaatttcaaagacaaagatctaccggtaccttcataaccgttaatagtggatgccataaacactaagtacggacccaaaagcttctttacaagtggtagtggaattgcggcagcttcatcaatgacaacaagttctgcctgtcccaacacatgagaatcatttggaataatatattgaatggtctgtctatgttctctcttgatgtctactctgactatggctttgttgaagcttggattggtggactgaatgatatcataatcaatgtgctcctgatagcctagagcgtcaaatcctttgaaaataaactcaaataaagtcttcaaattctcaggggaaggagatgttacaaagatattggagtaaccatgggatacagcagcagcaatagaaatacctagagcagctgatttacctctacctctacctgccgtcaatgctacagttgaatttaaagttttctctgaaatggcatcaatgaaggtcaagattgcatgagcttgattaaccgtttttgaaagagcaactaatgatcccgcaggctgaacatcttctaaagacactttcaattcttttagttcttgattttttggtgaaatttcttcatcatcctttggtggaagtggttttacgttttttcctccagatataggtaaaacgtttaactcactatctactaccaaacagttttcattcgaacccaaggacaagataaatctttcgttgaatcttgccacgacatcgtcatgagcttccgttctataacgagagtggatatccatagtcatagtgtataactgttttagagaggaaatggactttaacatgataacaatgataccaccaccttcaacggtttcgatggttcttgctagcaaatttggagtcaaagcttcaaaatcttgtaggatacacataccataagtgttacccaaaattttttcagtttccttataataacagtatcgaatgttttggttagagatgaaagtttcaaaaggatcttgttcatttatctctctggtacctctcttgatctctttcttaatctttgcttctctcttcttcctgtgtgaagtgaaacccaagagtttcttcttatacgtccataacacggatttattcattttgaggtcagcactcatcattaaatagtgcaagttcggtagctggttacgagcattgtcaccaacgataacgaaaaatgatctctgatttgtttgaacaccatttctgatgagagctgggatacgagaatcaatagcttttttacccatcgtaatctaacttctggtttaaagttttaagaacacactctttaacaacaaacaatgacagttacgtttcgctggaagttcgaccgttgggaagagttagtgtttttaatgattttttttgtagtaacgaagtacagtaatcaggtattttggggagaaataaacgtctcgtaatactcagatagcttctcagcaaaccacctcatctcatttgatctcatctcatctcgaaataaaattcctacctaatacgatgaaatagtaaaaagacaatgaaaaaaaaaaaaaaaaattaggcagagaaaagaaaagatactacttacccggaattatttgatgaaaatatactgttacccgcatgaatttcatgcgcagtgtaatttcggcggctaatttcaagaaatgactacgtgtgcataatgcaccattatgtgatgtcgactaatattttaaattcatatttaaacttcagtagtagttttcatgggtattaattaaagttttcttcatgactgacgaaaagggaaaaactaacattatataaataccagtatttttgtgtcacaaggaataagggcaatattcttatgaaatagatccgatgaataagataagaggttaagaactgacatcagaacgaggttcgattataaggttgtttctttacctgaacaagcgcagttgtggttatctcttatacggaacgtacgattcctaggttttattttggttttattttttcgtggtcattcaggtaagctcggcggttattccatagcaatagccaggaggagagtgagagctaactatattttcttttaataggaacagagtatagttttatgtgatcaaacttgctatgatggaggatttggaccatctgaacgatgagaatatcaatatagatgagaacgaatttttggaaacacttgataatgctgacggggacgtgatcaaaacttttaggaacgctgacgggtcattaagtagtcattttgacaagagaaaagttcgtattgctccaaggtcaacattgcagttcaaaataggcccaggctttacgccagtggtgcccaatcacaagatattgaacgattttggacagattcaagaaatcaaattggagcctcggattgatcgagggtttgatttcatagatgacgattggattggttataaaagaaattatttcaccgtggtaacttcatttgacacaccggggactgatcatatcgagttcatgaaacaagcgtatcatttagataacggtgtggagatcaaatacttcgctaccaaattagccgccaagtgtttggaagatgataaattgattaacctagttcaacacactgcaaagcgagataaaggccctcaatttgctcctccaatacatgttattgcacctgcaaatttgccgaagcaccagattataagagatgcatcgaacgtgagaaacgaatccaagatgaaaaaatttgatagctattttttccttcataaagaagacgttggaacaggatgtgaagtaaggagtgtcttggcaaactacccatcggatccaatcaaaaaagtagcaaggtatgaaaggatacagttcgcctcttctataactttgaagaaaactagccaacaaaatagacggttttcacttttagtggttttaggctgctatgtgaagggaagacatgacggtattcagcagtcatcaccttatcatgaattggatcattatgatgaagagactgacatgacgtttgttccaattctaatggagaagacgccgcctctcataataagaggaagatctccctctaactattgccaacaaatcaaagtcatgcataccaagaaatcagattttgataatggttccccacaagaaaacgatcttgatgtgccagctgataagaaagagcggaaaaggcgaggacgaaaaagtaagcaaccagatcttaaaactactgcaaatgtgtctcacgatagcgctggtcgaatcccaacacttctaaccaatggattgccgtccacattcgaaatatcaccgactagtggtaacatgagaattaagaatatacaactgcactcgtcaagcactgagacctcatttccaagaggtttccaatctgagtcattgtcagtagcatatttcagtaacagtgccactcccatacaagactcgatttttaagaagagaagacttaatattagtaaacctgttgtactggagtcaaaccttgaagaaccgctggatgacattacagaaaatatctttaatacaatatcttttgaggaaaggactccatcgaaagaaaacaaagagcgattatcttctacaagcgtattcctcctgaagcatgtgacttacgatgtttcagagcctcctgcggtggcaattcccagggccatgcttccaaacaagatggaaatttcctactgtttgaatgattattcatcaagttttatcgaatatccacctcctagtacgtcacataaaagattgcctggttcgagaaggctcttaacagcctccggaaacccttcggatctattaaaccctgcagactggtcggatgggccgagcatcttccgtcattaatagctttcgccttataaacaaccgcaactgttatccgtagcgtagacaaatgatgctgcaaacagttctggcaaggagggatgtattttggagagacagacggaatgggtaatcttacttgcgttaatttccgaacttgaaaacagacgtctctcatttttccatgaaaaaacaataaattttacaatatagagagagagagaggcgctgacaaataaagccaggcaaactaaacgaacgttcaccagaacatgtcagacatcttgaattcaattttttgttagctaattggtttcagacagaattttctttgcatattctcacggagttaatacagccaaagattactatcccaaatcacagatggcggataacccgaaagccccaacgttcatcaaggagggttctggagatttggaaagccaaaggagaaacgagcaagtcaatcgagaagttggcgaattggttacaagaaagtcgctcagcgatcaattgagagaaaattccaagaagaaacgccaacaatttcagagacagacaaaggaaaagaacagcttcacgagagtgtcaaacgatgacttagatcatatcaataaggtaaagctggatgaattggaaaagcttcgaaatttttcgcagtgggctgaatctgaggagcgtaatcgtcggaaacagctgcaattattgcagcaaccttctacaccggagcacactaacaaacaggtgatttccaagaacgatcctattccaacctccattaaagtacgaaaactaaaaacgtccaatggcgcaaagaatgcgctaggtgtgattagtaaaccaaaacataagaaaactgacagaacccaaaaaaagtagcgaaagcaaaaattgtggtttcaaatttcggcggtaatccgaatgaaactggttgtggaacttaatcgattttcttttccccccccccccctaattctgggcctaaaagaaaaaaataaaaaaaaaaggcttgagtacttgaaaactatattattattaatcagtgcattgttttgaagcttaatactaccgggtacccttttagggtgaaattcacataactaaggattgcgcttttagtaaaacgaaccgagtataaaagaacctgtttagacgttagttagttccttgccaatcaattgattcacagtttctagggtgatgtatttcttatgttttatttattagtttatactggatataaccaagaaagactcgcatatctacaaaatcctcgaaagataagaataactaatgtcagttccaaccactcaaaaagccgtcatcattgaaggtgacaaagctgttgttaaaacagatgtctcagttccagaattaaaggagggtacagccttggtgaaggttgaggctgttgctggtaacccaactgattggaagcatattgcttataagattggtccagaaggttcaattctaggatgtgacattgctggtacagttgtcaaacttggaccaaatgctagtactgacttgaaggttggagataccggtttcggttttgttcacggtgcttcccaaacagatcctaaaaatggtgcatttgctgaatatgccagggtttatccacctttgttttacaagagtaacttaactcactcaactgctgatgaaatttctgaaggccctgtgaagaacttcgaatctgctgcatcattgccagtttcgttgacaactgctggtgttagtttgtgtcatcacttgggctcaaaaatggaatggcacccatctaccccgcaacatactcatccattattgatttggggtggtgctacagcagtgggtcaacaactaatccaagttgccaaacatatcaatgcttatactaagattgtaactgttgcttctaaaaagcatgaaaagcttttaaagtcttatggtgctgatgatgtctttgactatcatgatgcaggcgttattgagcagatcaaatcgaagtatccaaacctgcaacatgttattgacgctgtgggaagcgaagatagtatccccgaggcctataaagtcacagcagatagtctacctgccacattattagaagtggttccaatgaccattgaaagcattcctgaagaaatcagaaaagataatgttaaaattgatattactttgttgtatcgtgcatctggtcaagaaattctattgggtgcaacaagatttcctgctagtccagaatatcatgaagccacagttaaattcgttaagtttataaatccacaccttaacaacggtgatatccatcatatgaatattaaagttttcagcaacggcttagatgatgtcccagctctcactgaaggtataaaagaaggtaaaaacaaaaatgttaagtatgttgccaggttataagccgatactgaaaagtacgtatagctctacttttatgcgaaatatgttacgaacaattttatgaagtttagaacagaaaacacatcctctctcttaagttattggagctttttcgagattgatctcactgccggtaacatttacaagggattgtatcatatgtgtatataaactataatctaaaaatgtttatctcaagacgaactaaaaatagttttattataataaaactgtgaaaggtgatttgatataccaagctatggccagaatcgtcctctcactcgaaaccataaatgggaaactaggatttaattatagatacgcatctcgatcgacccaattataacattgattggtaaaagaggtatcaagactgaagaacatatagtacagttatcttagtattgatattcttaatgatcattgatcgaagaacaaagtacatccaacgttattgtcagatttaatagtagaaaagatgtgtgtcagatacacatgcagctgttattgcgacttataacaacatggcaccaacaacagctaaaccggctccgacaatgttactgtccaaaatgccagcaccgttttcagtgtaggggattggggtagtttcattggttggggcaaggtgatgagtagttaccggtttggtttcagttgttggataatcggtaggaataactggttttgtttcagtagttggacagtcagtagtagtaatgatagttttgtttttagaaacccaggtataagtctttggtggcattgggtaagaagaggtactgttatggtgtggtggtggagctgggtaagtggaagttttgttgtaatgtgtcggaacctcagaagtagtttcgcaaggaatctccgacgtaacggtgtaagtctgatgactggttgtaacattagatgtaactttgtatttggtggagatttcaatgctgcttttaccctcagtggtggttaaggtctcagtcttgttagatggatattcagacttcgtagttggatattcagacttcgtggtcaaggtctcagtcttgtttgttggatattcagacttcgtcgttggatattcaggcttagtggtggggtacttagacttcgtagtggagtacttggacttggtagttgagtaatcagacttggtagttgagtaatcagacttggtagttgagtaatcagacttggtagttgagtaatcagacttggtggttgaaatttcagtggtctttttgtgttccttgtcatgtttggaactgctccattttggtttactgtaatcttcatcatcatcagagtgcttaccggcacgcacaacactcaaggtggttaaagcgacagcagcaatagtagaaaatttcattatttggaatggatagatggccttgtgtttggttattcgtagtcacgagaagctgtgccacgaaagtccattagaatatcttataactgtcattaatgtaatgtaaccgaaagtgaagggatttatgccctaaaaatgtgtcaatttatataaaatcaaaaaacagcaataatagaggtactgcattccctgcaattgtacaaaaagttatgcaatgtcatcacttaagaaacggatttcttgtgtgtattgcaatcaaatctgttacggctttttaaggttttcctctgacgctgacaccggttttcaatttttttttgttttggcaaatttaagaaactgacacgcgacagcaaaaagaaaataatcaactgaggtcgattaagggttcaattgcaaataaatcttgcacgagaccagatggaaaggagaaaccgtcaggacaacttttacttcttgtgaattcaatttttttgctatagaccgattattttgaaacgttactatactttcagtattacttctaatggaaggcagtcacgtccaaagaaatggagggtactatgagtccggttttgaaatcaagtaagctccattattaaactactttcgtatttctcagtataaagattatgcgacttccagttgttgtcatattcatataaactgttgttcttggaggggaataatttaccttatgagccttgaagcttaatttgagttacaaaatattaatgtaaaattaagaaaacaaccaatgatgaattacataaatcataacgattgttccaaatgttaatgcattgcgacggagacaaccaatctgctgggaagcagcatctcgaaatacttaattgacaaaagtggtaccgatcaaagcacagtcagaaaaatgggctgtacatgttttcttgttctctatagaatccttgcatttcgctgatattgcaataaatgctttaggcgtggaaaaattaacaacactcaaataaaaaagtactgttattacttatgcctttgatgcaggttttctttgttaataatgcaaatcgttggaatgatgatcctgccgagcttaatgtttcttgtgacgaatttcataatgtaccaatatgttcattgttacccgccctcgatattttcctcattgattgatcacctgactaaaatatcaaaacttgagcttttgccatgtgaaaattaaaaatatcgaaacagttccgaaaataaggtacttgtcgctccatcatactaaagtgttcaaacagctaagtaatcgaacaagaccaacgataaactgaacttattagggaaccttgtgctttctttatctgcagagaggcttcaggatttaaacttcgactttgctaatagtattaaccgtgccttctataccgataggaggaagtgacgtaaaactctagcataatggcaacgtcaccgagtaccacaactggaaaggatatcaaaaagaaatctgaacgtcgatcgggccctaggtttgatcctgctgaacagcggtggaaacatgtctcctgtgagaagaatagacgatcatcgataagaggatcctatgacaaattggtagatttggttcctggcttatcagaaaaggaacgtcgatctgaatggaaaatatacgtgaaaagtatgtatcagtcattggagcattgacctacgcaaaaaaaattctcagacggaccattgtactaacaaatatgtttaacgactattcaggccgacattacctgctgtggctatatgctaggaataaacatctacgacagaagttaaacgagttaaacagagagtatcccgcacatttatttctggagagacatgacagcggctgtgagcgtaatagctaagtagaatcaggctccaaacaaaacatattccttagcattccaatgcaaagatgtacgtatgtaataactcatcaatcctggtaaatattctctcaaccataatgtctatattcttctgtaaagcgctaactttccagtaaaaaaattagtgcgagagattcaaaaaaaaaacgaccccggagaggattgaactctcgatcttgcgattaacagtcgcacgccttaaccagcttggccacggagtctaacttgttaaacaggaaaagagtcggtgccatcagtaccacaaagatgctctattgggccaaatatgactatatatatttacggcccttcaatgttatcaaaagatactaaaagaaaccaagcagagtacaaatcaaagttgcgaaaggtcataaatcgattgataaggtacataaagcataaaatatatctaaattatgaatagtaagaaaaaacacaagttgcagaagcctaccatttcaagatgaccatattcttggtgccctttgttttgataccatcggtgatcaattgtaaaacttcttcgtccgaggcattgttgacgtcccattcgagtgcacggatgtcttctttaggagagatgattttaccatcacggtacaactcaataacttcattcacagtcttgattttattttcagggtctctcttagagttctcagtaacccagaagccatgagattttaatcctttaaaaatgaacaaccctgttgggaaagtcaatggttgctttgacataccaccgtaagtcaacattaaaccatcctttgacaatttacgagctatgttagcacatgatttacctccaacggagttcaatgctaatttgacctgagcgtttgaccccaaaacttttggtagaacttctttaccaaattctttttcgccattctcagtttctgaaataactttggtagctccatacttcttttccaatatttctgccacttcttcaaagttttcacgatctctgatgacacttaaggtgttaatattctttgcctttgcgatttgcgtaacaatcttagaaacagaagaagttccagcattctgaactagccaatcattaccttttggatcccagttgatgtaatcattaaccaactgataagcggtgcatccattaacggcaacagtagctgctgtgtagatatcgacaccttctatcttgatcaagtcagattctttgtcacacgttctgtaggtggaccaggttccgaaattagcttgcaatggaataactttatcaccgggtttcaaagtgcttacactggatggtaccgaaaccacttcgaaaacaccttcattaccggcaatcgcagaaggctcgtcagtggaataatctgtaactttatctggctttgatggataaacaccttccaactgattgatatcggagggattaatcgggaaagctagtgttttcaatacgatcgaagtttcgctccctttctttggtttgtaattatgaactttcaagactttagtacaatcctgagaatcatgactggaataaatcaatgatttgaattttaaggattcttgtgacatggctctttgagagaatgaaaggaatctctttgataggaatgaactcatctgaggaatgatttggctgtaaaagttttgacaatgacactaaacgaaaagaaatagagtataccactatggaatgactactgaaactggtgtatattttaacggccaatagtattactcatacggttcgagcctcaactatttatactcgaaaacgtctcggacctatgcttcttactaactttcttttgttcgctcaatattcaatgaccttactccacatctagataggcaaataccctttttttagttttttttttcagaagtgtgtttgctagagttattttgcacttttctgccattggaaccgcaccagaagcatctcgtaaaagaaccaaggccaatactgagggtcaaggtttcaacaaaccggagtaatgagggaaaaagaagatgtcacgtgaacaatgcggctctaagtgggtgatgataatcgtctgagttttttgatttagatgacacaaaaagcagatacatgaagcagtcaaaatttacagacagttccaaggcttgtttggatgccttgaataaaatcagagagttatagttgtatattttgtcttttatttaggagatgaaagtgtttatatacatactactttaattagtttgaaggtgcacattggtgttacagaggtctggtgccaacgggatactgatgagtgaagctcacgaagaactgttttcccatgtggacagcttcaaatattccacgcgatccttaatatatttacacatgtttttcacttcttgctctggtttttccgttgcaccgatgacttcgctcaagtacgaaaagttcaaataatcatctggatttttgcataaaacatcatcgaacaatttccaattagctagttcaaggtcatagttggttaggtctttgaatgtcggagagtacatcctatggtgccctttaccattgggtacatatttagatggatcgtccatcttcttagtagccttcttaccatcatacaatagatctccagagatggatagttcccatgggttgtacttagggaggtttgaatgaagaaaaactggtgttgtaaattggaaaatagtgaagaagtcttttattgtgtatttgcccttcatgctatcccaaaatttatctgaaacctctgacatcttcgaaactttctccaaagcatccttttcattcatatctttgaactcacttttgtggttctttatatattccaatctatgtgcctttaatttgttattgacagaaccacggattgcatctcttgcgatactgtcaaaggtcctgtcctcattataatcatgttgaatcatagcaataccacggtattttttttcatttgatggagtatcgtcaactaaatcatcttgaattctgacttcgttctctattttcccccagtagccttgaggacgtaccggcgttctaacctgatagtatctgtgcttcaacacagttgccgccaaaataaatgtatccttgtcaccttccccggaaataccttgtcctagtaatctataatagtaggaaggtccattgtagttgtaatacagagataaaattagagcatccaaatgactagctttattaacaagcaactgaccagactctgtactaccgtctgggatcgctccttctaaatcatggaatggaatctttgcgggatcggactctgggaacagccttgaattggtgatatagtctgtgctgtagcgagccagcttatcctggaccttaatgtccacaatatcgtacaattttggactgtgaacccttctccaataatctggccacaaaataagccctgtttcacggaagatatcaccatcaaagaaattacccaatgagttgatgacataattgtctgcatctaataatagcaccttttcaaagctagaaatcaacagagacaatgatttcaattggtaacctgtgatatcttttaaaatttcagaatcaaaaaattctgacaaatagacacacttcgtcaaacctgaagggtcgatggtaggaattatgttttcacaaacttttctatcagcattatcagagggtggaataacgatttcaattgggacactacttttcaatgttaaaccgctattcattctgatagatttgataaccggaagagccatcaaagtgtatttacccccaccaacaatggaaataccctcacccttatagactgggtccttttcagtgtttagctttttgaaattcggcatgagtttatcttgtaaaagtttcttgaaattattgtgagcctcttttacttccttcacgtcctcatcagaaattggcaaacacttcagaaggttatctttagttaaggttgaaagcttttcagagtccgtgttttcgacaccagtgtcggaaagtttacaaccctcaggcttcttaacttctaatttacctttcaatgctgtttccttcaatgtggtcataatttcctgatagaaatctttcaggtcactgctaattgtgacaccattactgactgcattactggatgtaagttcagaagaaacttgacctccagagttcgaattagctgtcgatgagtcaggaagtagattggaaaaaccactacctccattataaccttctccaatagtgtcagaaccaaacccagagctaatatcgtataattgcttgatactatcaccaccgaagacagagaagactatgatgacaaaaaagaccgccaggatcacacagttatgtctcttcataattcttgctcttcttgagaagtaatgcagcgactgtttccatttcgaggaaaacgttcccccaactgaattcgtcatcaaagattatattttatgaaaagagttcttcaaacaggattaaactgatcttaggatcagtgaacttatttcgttaaaatttgatgtgattgtggggtctcgttgttacaaaatctttctaaaacaattgaattacgtgaacagaaaatattcagaccgatttgaatatgttatatttaactcgattcaaaaggctccattgtatttttcttgataactagaagctttgaattgccgagtgatcagagaatagtgaaaaatcaaaatgaagcaaagcacgtgatgtccgggtaatgtcattcctcaaaccaccacacaatttggcgtcaccaaagaacgtcagtttagggttgcaggcatctccatattctagtaggaaaaaacagtcccaatcttcaacttttcagttagaaattatcaactcaattgttacttgcccagccaactataacggggtaactaaaaattgcctttttttcttcatttagggacttgttaccgtcaggctgacacaaataacacgcattgaatatttgacgtctcgaatggaaaatcaccactgtccgattattagggtctaaatactctgcatattggaatgattctctgaaattatttccaataaaatttgctgagatttatttttatatcctatgaacaaacgatcaattcaggtgtcgatttagtattgagatctcattattattgatgaattgattagatttggacagaagcaagaagtccaacgaatagccaaataattatccagaatggcggataaagttagcttcacaaaaaggaaattgataaaatattcctcaatgatttgcggttctttggaagaatgcggcgagttagatttgacggatggagatttagaggatatattagtaccacaaagtagagataattgtgctgctgagaattggaatggtgcaaataactacacccattcaatttcacctgctgattatattatcgaaagaaaactcctttctccaaacatgactggttggcagtggcaggcgaataaacagaaaatgcttgaatctgagattcttaaattgattgagcaagaaaaaccggaagatcatttgaaaagattcacacggtcgactaaaaaaaaagattctcaacaagatgaaccagtcagtcctatttccatcagcggtagcgaacaatttgatattaaacatcactttttgaacacccctccagaaacagaaagatctctgacactggtattatctgaaatgattgtctctaaagaatatgtatagtttcccctaaataagaagttattaagtggtatcatcataccaatatctatatatagtacataaggttatccgagtaatcgtatgagttcagataacttaaaatttagtcggcaagggctgtaaagtatggaatggtttctttaaaagtgtctttccaagtagctccgactagcaacataactaaaccccttaaaataatccgtagatcctgcaaaggcggattctttcgttgcacgagggttgttaatctctatgccattatcataaatactggtgtctagccttttctccgtaaattctgtatcaaagttttcagcaagttcccaatcagtgattatcggtaagataggtcctactgaaatcttttgcaggtcaccgcttaaaagctgtttccagattattttcctgaaaatgaaatgaccaatataattagtcgttttagcttgaccagctttctttttcttcgttttaggaccatcttgggcccaatatttatcaacatcccatctttttgtgggatcttttctcaacaatgcaccgagataatctttgaatccatcgcttaagtaacttggtattctagcaccagttttctcttgcttaattttgtttaatataattttatggttaactcctgtaaatggtggtttaccaattagcatatcgtatactaggcaacctaaagagtaccagtcacaattctgagtgtaaggttctcctgctaatatctctggagcacagtattctggagtacctataatggaataaagctgatttacgttctctccttcttctggtgtggcagcatcatcaaaaacacttttcttggataatccaaaatcagtcaacactagatgtcctctttcatttaatagacagttttctggtttcaagtctctgtaaactattcccttagaatgcaaaaattttagagcacaactcaattctgcagcataaaacgcaactgtaccttcatccaaggttccctgttcttttaaatgataaaagagctctccaccaggaatgtattgtagtaccaagtacaatttatgattgtcgtggaacgaatagaacaatttcactatattgggatgttctaactgcgataatatagtccgctcagcaaatgtcctttctatcctcttttcaactgtagtattggcgtccttttctatagagtcttccgaaattaaaatttcagccttcttcaattgtttcatggcatacaatttcgatgacagtgagtccttcaccaatagcacttttccgtaagcgccttctcctaggcatctaattggtacaaaatcatccaatactcttggtgccccagtcttagagaagctggatgctctaagttgtctggtttcttcgaccgaagaaaccgagagtacatctcgagtttccttatcactatctccttgagcattcaatgataacctaatcgtatgctgagcaggattcactacgaatttattgtagagggaggacctcctcctagctggttccttcgtctgagattgcttggactcaccagaatctggtggtactaaaaagcctgacatcatttcggcttgttcttctgtatctgaaattagtgcctcttcttcgtatgtattcggtggtaaagcagataaatccatacggaattggttcttgtgcaagggcaaattcatagtacttaagccagatgccggttgaacctcattatcaaacgaatccctatcatcatcctgagatccatcatctataatggcacatgtatcattcactctaagtaatttgaagtcttcatcgaaactaaaaagtggcatctcgtattatctcaattcaactacaatagaagactttagtagcattcctcagtatgatttgttagtatttgattctgtttagtaagctctgtccgggacctgtgaagaactaatttcttgtgatgattacgagtgatacacgttttaatgcatgcgatattactaccttttttttttttttttttttcaatctcttgaaaagttcagaataaaacatgcactctgccgcccgtaactttttaactggtcattccgtggataaaagattctggtttaactgtaaacaaaatctaagatataatagatgtatcaagctgttgaaaacttgatgagatacatatagatacataggatatttcataaatatagtttgtgaggtaacgaaatgaaacggtggaagaagcaatctaacgttttcatgaaaaaatgcaagtccgaaaatttatacatcatgtaatttgcaggcagtgtgggatattcttcttgaatatgatattggctcaaagtgtcctgaaagagcgcttcataggatacaatgctctttcataagttaggatagtaagtttggttaattagatattgtacaagtccgtgatcttttcgtaaacatctttgttcattactccgttgtcatatagagctttgtttagcgtgtggatcaattcaatgatttgattagtatctagattcattaggatagtagacacaaccgtgccaactgtgattctgttttcgctaatgaaagtttcgtaatacaagttcatgaaagaacccatcaaaaattggcaatcgactctatcagtaataccaccgtgacccggaattgaatcaccaaagtccttcacttggaatgtcctcttcaatccagacgcaaagaaacccccaaatggtgcaaataaggatgcgaaagtggccaagttcaatgcatgcaaatagaccggtttgatagtaataacgtcaacgccaatcttttcaaaaataatcggaggtagtctataatcctgtggaacgaaaacagggttcaactcacaactcaacgctgtgaaaaagtttgttttcaagtctgtaactggacatgtcatgtagtaatatggtgcaagaagtctggtcagtaaaacactggcaattgcagtgaaaaaccatgcgccgaggaaaccctctaaagttttctttggagagatttcaattagtttggtacgaccaaaagttataccacataagtaagcaaatatatcgttcacgatgaccaagccgcatggcaaaaggaaccagatcaaaccgttcaaaacattgttgatgatcaaatgtgcttgaaaaaccaccaacagcaaaaccatatgtgtcacacacaatgaagcaaattggaattttaggtaaccttttctcaaactgcaaacgaatataacaaaacccaaaacatagagacaataactaatgaacttgtgattggatgccacgaaattcaaaacggtatacttcacgaaggtatcgttgaagaacttgaaaagtgatttaccgtccaaatagtatatcgtagtaaacaaaaagtaccagttcaaagttttcgttaaagggaggtttttttcacgtcctgattgtccagtaactgcaatgcattctttgaaagtggcaatttggcaacccaaaatcaagacaacacaccaaaagtgaccagaagccaagatgataaaaaaacctgcaatcataacaaatgtccaaatggttctaacagcaaaattatatagttttgaatcttttttgacttcaaccttggagtgttttttgtaatcttcaactaaccgtgttctcgatgttgtttctcgatgttgtttctgaggtgttgaggttgcagatccaccacgggaggtgttaccagttctttttttgactgtcatcacttttatattcccggttagcagattgtaacgtgcttagatcaataagatgctgtgaagtagagatctgtttccttactcatgcgagtgatgatgctcttcttttttcttggttgattatatatttccaccatctattccaaatggataattttcttcgaacttcaagatcatgtgacatgtgaaaaaaaaaccatgctcccaacttgtgtaaagttcctctacatacatacgatatttacagatgcagcaataagggagagtctttccattttagcatgtgtgtaggattgaaaggtcagagaaggccctgtttcttaagttcttcgtatacttgaacactcatcacattaccttcattgtcctctgtttcaagtaccatttccggttctttcacagttgatattttggaaaagggttcacctgactttagtgtactctttgcttgcaatgctttccatagctctgtcacctctactatagtagtgacatctttgaatgcaagagaaggagttatgcctaaagatttcaaaccttctgaatgttttttcagtgggaaatgtttctcgaattctctacgcccatgatatatttgattaccgcagatctcgcaaacatatttcacatctaaaccttggactttgatgagccagcgaggtataggaaatccgtcaggtcctaatggtaggttgtatggattcgttggatccatactctctttttgagcagtatcttcagcattgtcaatataagatggtttatcttcagattcatctttggcgtatatgggtgattcatattgttcttgtagcttttccagctcttcagtaaactcttcatctgtgaatgcaagttttctttccgtgaatgatattgtattttgcaatactttagagagaaatttggaaaaacagtgaaacgtgtattccttcatcaaacgctttctattccgagacaatgcaatattaaactgttcagtttgaacatgagtattaaattccgactgactatcaaaccatcgattaaacacaacggagtacattttcccgctttccttcgatggggattctgtgataccggtcctcacatatttatcaaatccattgtggatggttttggaaagaatttccttgtccactagaggataagctttggagtaataggccttataatatttcagtaactcagtgactaattggttatattccttggtgtctctatctaatgatgggttgagtaagtagtcgtatgtttcaaatgattctaacatcttcaaaaatgaaagtatcgttaaatccgcacgcttgatgatattcaaccacttcttgaattgttctgagagatccaaatacgtcccaaagttttcatctctagcaaagtttcttgaaagatcaattatttgtcctatgggcgatatgatgttcttactggcagcttgagggccagaaaacatctcatagtcagatttgacttcaaccagagaacgtgagtttacttgaccctctaatacttctgtggtgacggtttcaaactgttcaaagctagcgtttgtatccctaaagtattctaaatgttcttcactcaatttgtgcttttgcaaagatttcaacagtcttctatatcttccaagaaataaggcgatttcatattcttgtgctttgatttgctttctagaacgtttgcttttcttgctcctgtaaatcctgttggcagaaacgtctagcttaggtaccgcccaagcttcaactcccagattatgcagtgcttcgttaaatctgtaaaagatttctggatttcttcgtagtctggacgaaatagcatcctcgatgacttctaattcttctaatatctttcgcctctcttcaaaacatagataagtgggggcattcatatctattgtcttctatgaatcctctaactgctacacagacagtaaaccgaaggcacggtattcattttgagccttcatctgatccatatttgtactttctaaggtatttccattctttacatttttattttctataatcaatggcaatttcgacgtatgaggaacaaatactagtaaacaatgtaaaccagcaatacaatatgtcacatatcataacaataatttggagagaggccatttcatgtttaagcttagaaaatgtctattcaattacacactgattgttatttgagcagttacataatatactaatgttttctccgcttcgtaggacgggcattcttggaacgctttttctctttaatttctcttagctttctaatctcgtcaactgactttatttcttgtttcatcccaggaccattataacccttaactctaacacctctttccaaagcagcttccacttttttcttttggaaagcgtaatcgtctctatgtttatcaggcaatttaggagctttttgagtcttgtgtttgaatttaccgccaaccgtacgctccgatggagaagtcggatcagccaatagattcgatggaatagtggattctcttgcaccaactttgagtggagcaatttttcttgccttagaccaatcttggaattttccggatctgaaacttgcaggaatcttttgaccactttctccgatgatgtactttttgttgtccaaaccttgagtgttcacatatttcttacgcttcttgtcccacttaaccgtagctgtttgcttgtgaacttgtaccttgtcatcgttggctagatcaaatgcagcattggaagcatcatttgtgaaaccagatgatatctgtaattgtttatcttgaatgtcactagttggtgcgaaatgtgatagataaaaagttggatctctgaaagttttcttctgcttcttcttaatattttcttgctcttctaacaagacatcggcatcttcaaattctttcaatacctcatcaggcactgagtaaccaacttcgttgtcttcacctttcaaaatttcatcttctatactatgcctcaaaccaatcattctctctttttccagaagttcttgtctttcttttgccttcctttgaattggagctatttgtctcctccttctcttcattaacacagacatttcatcgtctggattccttgcgaactcgaatacagtttccttgttatttctgtgttgcaacttagctaagaaatccaatttctctttttcggcgttcttaccgaagtatatattctgttcgtcccatcctgatctgagaatttcctttgaccttttcatggattcagcagacgctggtgtcctggttctaaagtaaagtttttcggctttcagggcaacacctttcacagtatttaactcaaagtcagatttgatcatattgctataaaggtcacccataccatcaatctcagaacgtggacaagcaccaaggaccattcttgtggtgtaagaaaccttaggatcggtgaaattattattaccctcagattctgccttctttctgagtatctggcacgacgattcatacatgggtgttaaaaggatcttcttacccaagaataattctagatccaagagataaggtagttcattttcagagacaatcgaaaaggcccaacctctattaccagctctggccgttctacctacacgatgaatgaaaatttttgaagaacctggcaaagagtaattaatcacattcgctaacaaaggaatgtcaacacctctggctgccacatctgtcacaaccaagatagatgttaaaccagctctaaaattatagagctgttgcttacgggcatgttgattcaaagcaccataaatatatgatactaggtatccacagttcttcaataactgtgtgacgtattcgacatgatgtcttgttggaacgaaaacgattgttgccttttcggatggcatttcgttcgcattcggtaagcgccttttggattttttagccttctttgccttctttttcttttcatcttcgctgtcatcactgtcagaatccgcatcattctgctgtttgagcttctttatttgggactccgtggcaacaggcatcttgatagcttcttgtaacagatataatagattggcttcacgttcatccttttttatagatataaataacatctccaaattttctgatatcttcgtttcagcatcaagtctaaccaatactgggtttgacaagcctgccttagcaaaatcaaccaatgatgatggcaatgttgccgaaaacaataatgtttgtctattagttgggaatgccacaagcagttcattcagttgttcctggaaacccatttcgaataatctatcagcttcatcaaatacaacatattcgactgatttcaaatccaagttcatttcaacttttaaatgcaagaatctacctggcgtagcaatgacgacgtcaggattccccatcatcataccgaattggtcttctaaagagtcaccacctgttaacaaaatagaacgtaaatccgagcctttcgaaaactctttgaaaactctatgagtttgaatggccaattctcttgatggtgataaaataacggctctaacaccaatcttggccgaatgggtctttaatttttctatcataggaagcacaaaagcagcagtcttacctgaaccggtacgtgccataccgacaatatcacgcttttgtaaaataaggggaatggttttcctttgaattggtgtaggttgcctgaaacctttcttcgagatattaatcaatactagttttgagagaccgaaacttgcaaacgaacctttcttatgtttagccgcagcatcagcggtagtgttgaaataatcgtttaagtcatcatccgattcattcgtagccttcttttcgtcgtccgaaagctcaagacttgggaacttactgtccacaatgggacctgccttgactttggctttcttgttttgtttctttggtttcttctctttctcttcctcatcactagaaaactcgataacatcttgaacttcagcttggaaaccaatattgtcattatcatcatcagaaatgtcactatcttcactatcagcatttaaagcaatatcaccagcaatgtcgaaagcatcctcatcttcggaggagtaatcttctgctgggagagctcttttgctagaatcaaccattactgttaaatttgattaacctgagttcgatatctaacagttgatttatggcaaacaatgattggccttataatcaatacgatataaaagaatatttagcactactgatattaatgagttactatctcatctcatctcatctcatcgcatctcttatttggaaagtgatgtattttcaaaattttcataaggaaaaagaaatagttttcaagaccggcataaacagaattaaacatcaaactgacgctttgtgtgaaaccaagaagatcaagtgacctaaaacaaaaacttcaacattatgtgtcacgaatattaccaaactcaagtaaatagaacgtcatactctaaaattttactataactatttcaacttgtttccctgaatttcgcctctgtacattatcttggtttttttttttctatgcaagccaatcaattcagtatctgacaaaaaaaagtacatgaagatcacaactataacttctcaaggtttactgaaataagtaccagctatatcttgttaaagcaccataaaagtgtcccgaaggagatgcaccactttatatagcagacggacagaagttgcgaggaataatgtcgaaaatcacttcaagattcttagaattatgcaaacaaagacggttgcctggatatcatgtccaatccatgccatctaaatttgataatattgtggtaggaatgtctggtggagtagattcttctgtatgtgctgcattattcgcagcttacccgaacgttcatggagtatatatgcaaaattggggcaaagatcaatcattgactagaccagaggaggatccatgttatgagaaagaatggaaggatgcagaaaaagtagcgaaacatttgaacatcccagtggagtttgtgaattttgagaaagattattggctaaatgtgttcgcgcctatgttagaacaatatagtatgggctatacaccaaatcctgacatcggttgcaatcagtttgttaaattcggaaagttgatggatcatctggatgtgaagttcggtaagaacaactactggttggtgatgggacattatgctcgaatactacgaagagatagtggtccagagagatctgaaccacacttgatgcgcggattgtatcaacagaaggatcaaagttattatttatcacaagtttctgttccttctttaaatcaaatgattttaccaattggtcacttgacgaaaccggaagttagagagatggccaaagaagtagatttacacactgccacaaaacccgactctcagggtatatgttttgtgaacaactcacagcatgggaagtttaagaatttcctaaaagaatatctacctatggaactaggaaacatcattaccatcgatgagctgactggtaagaagacggtgtggggaaagcatcctggaatctggtcctatacaattggtcagaaaattggaatatcacttcctcaaggtgatccaagatatcaaggcgcatggtatgtcagcgagaagaataaacgcacaagagaaatcgtaattgtcagaggaaaggataacaataatttgtttaaagacgtggtaacggttaaacacttcaaaatactctccaagaatccactatctaaagaagaattaaacgaagctataaataaagaaacgctacacatgcaatttagatccttacagaccccagtcaaagtaacatcagttgagtggataaattcgaatgaattttctttgaaactggagcgcaaagaaagagcaatggcacctggtcagtactgctgtttatatgtgaatgagagggtcattggaagtgggataatcgactgtgctcgatagtatactgcagtgtatgcgcctcaagctaaaatactcgtctatagaatcaaataacttgcattctaatcacgtgatatcatcatgtgtgtgaatcttttcaaatagaatcaccaacagccacatatggtcccagtcaggtgcaactgatattccaaagctataataaaagaactggaaagagagtgtaacaactgaaaagaattttggaaatagataatctccgccgttaagtatcttgagtacaacacagaatgttaaattagaggtattttttgtaatctacaatatagaactctactactctgactgaaaactaaacatatcgacaagggaaattcgtataatgtctggtcaatttgccaaggaacttgctgttgcaactcaagccgtccgcaaagcttcattgctaactaagagaattcaagcagatgttatatctagcagtaactctactataacaaaatctgatcaaagtcctgttaccatcggggactactcttgccaagctatcatcatcaatgccattaaatcaaacttcaaggatgatgctgttgtcggtgaagaatccagtgatggtttgacagattcttttatttctgagattttaactacaattcaggataacgacaaagtatactccgaagtttttgcagacgtcacacaacaagaggagaaagacgtcccttttgtcaatgaggaattccctctaaattccattgaagaaattaaaagagttattgattttggtaactattcaggtggaaacactggcagattttggtgcttggacccaatcgatggaacaaagggattcctaagaggtgaccaattcgcagtatgtttggccttggtagttgacggtgaagttcaaattggtgtcattgggtgccctaatttgaaactatcaaactacggagcctctgatttgagcgactcactatctgcaggttatattttcagagctgtgagaggacaaggtgctcaatattccattaccactgaatcacaatggagggaaattcataccagagatgttgaaaatacttctgacctggtttccctagaaggtgtcgaaaagggacattcgtctcacgacgaacaagctatcatcaagaaagatttaggtattactaagtcccaacatctggattctcaggtgaagtactgtttacttgcccttggattaggcgatctttacctccgtttaccaattaaaatgtcctatgccgagaaaatctgggaccatgctgcaggaaatgttattcttgaagaagctggcggaattcacactgacgcacttgaggatcaacgcttagactttggaaagggtagaactttgcaaaccaagggtgtcatcgcttcctgtggccctcagagcttacactcgagagtagtatctacatcagcacgcatcatttctgctagaaaaacttgaacgcatattattatcaaacacatacatcaggttatatcatagtatattttttcaagctacttaatgaaatgtagacgtaccttaaaccgatacccaaataatcaggcataccaccagtgcaacaagctgttgccaggtagagcttgttcctacaaccgatgagtttccagcctgctagcgcatgacgttagctatataaaaaaacccctacaatagcactacttaaccatagatagaaaatgtacatacgtacttaagttgaaattccacatagtcagtgtaacatattacccgatagttccaaattacttcaaaatcctgatcacaaactggcatccaggccacctttcccaaggaagctccttggcgttttcccacatgccggtgtgcattttcccataaacctacatataattgactgtgcctgaaattttcatcactgctattctggttgaataatatcgataagaaaaaaaaaagaaaatggttaataatttcaaatcatgacaattcaaaggactggacatgcaacgagaaacagcaggcaactaccataattgcaggaactggagcattatatatatgttcgagatttgtgcagttagacaagtgtttgacgtttattgacatttggagaacctttattctagagaaggagatagaaattttccatagacgttgccttgagagcgtaattatagcatcaaaagtttttgaaattgaacgacagagtagaagttcatcaaggtagatcaatacttgaggttcaagaacttgtgtattgagtacaggttaacaatcgctggccattgttaatctgcttgattagtttcaaacttcagtcctatttttttatcctttttccgctgcgaagagtgcgctggctgcacttctagttgctagacatattaaagtattggttctattagacgtttgctctcgcgatgattgaggatcttttagacccaactagcacgacggtggttacttacacacattatgccaggatcgctgcgttcaaggacctgaatacaacgaccgtgaatcaggtattgggattaccagggcttttttcaacattcaacgctccgcaacttcggaagctcaggatatccgcaatttctgcttctgtggcatctatcttcgcatgtataataggattatacctactaacatcgatagataggcgacggaaagtgttcagacatcatttaattttttaccttttagtttgtgactttttgaaagctattgtattattgatttatccagtggtaatattaagacacaatgaaatatatggaaccccagcattctacaatactgtaggatggctcactgcttatgctatcgagggagcagatattgccatttttgtctttgcgctgcatttcgccattcttatctttaagcccaactggaaatggagaaataataacacggggaatttggaagggggcttcttcaagtggagaaaattcatatacccattcactgctttgacaccgaccgtgttagctagtctagccttcattaatttcagcagttataacgaagatgtcatcgaagctgacaccaacgttgtgttagacaataacaattacaattttgaattccaagcaaagatggggggttataaacctttaagcgcatggtgttacttaccaccagttccaatatggtataaactagtcttgagctgggtgcctcgatattttatcttcttgacgatttgcacaatatacatcagcatctacgtctttgttaacagagaaagtcgaaagatcaaatcagaaatcaaaggattccaacactcggaagacaatcatgttaattttttcaacaggaagccatcacttaacattgctttgaatgtaataaatggttctgctattggaataaaatattgtttcaagagattcgtttcgtttttacgtaactttttctttctcgaattgtttgatgatactgaaagccaaaaacacaatttatcagcagcgggcggtcgacagcgtgctggcacgccaggcctaccttcagtgaatgatttggatatagggctatctaacagatatgagtatagcccagatgaggttgacattgaagacggatacaataataatagtaataacggtttacatttgtttgaatattctaatcttccgattgccagtcatgacggaagtgaagatttaaacaaaaatcgtaaaccagacagccttacaccagcgaaacctcaagttgctcagtttcggcaacccgctaactcctatgcttctgcaagatgtcctccgagcatcccattacaaacttcttcctctccgaatgatgtgcccaatgtgtcgaaacatagtacaaataccgttgataaccaagcgatgggaacagaagtggatattgaaaaaatggaacatcttccagggaaagatgtcacaggcataaagcataagttccaatctgaaatgtatgcgcattttaaaaatcggagggatcagattaggaggcaacttaaatcgatatttgtgtatcctatggcctatttattactttggctcttcccattcattgtagactgttctcagtacagctacgaaatctacaatggccctattgtatggttggcttacattgctacgttcatgcaaccgttgaatggtgttgttgacgtggcggttttcctgtacagggagcagccttggagatattcttggggtttaattcatttcaaagaactaatcagtaaatacaggctcaagggagaaatcggtgaggcagacatcttaagtatgtgcgaaagtgaacttggaagacgtggatggtactatagaggaagatgggtaaaagaagaatgctggaaatataaacctcagttatggaaacgtacatactggtatgtccacagaacagtaatcggattatggaggcttgatttgaatttcgaggacaactgcttagatagagattattgggattcgtattatggaaatcatgctagtaatacaatgtcaatgtctacaaccaacaagctcaagctgtttcctgtactgcatcaaagtttatcttcatcgacaggaagtagtgaaaacggcatagatccatataagaggaaattcaaagtgcctttaatgtggagaatctttcataaacttcctctacaagaaggtattgaccttgatgaattagatcgttatctcaagatgaaaaacagatatgacgactttattattccagggttgcaattcgcgattgaccagaatacgagcaacaacaataattctctatttaaacccaattaccttctttcgagcagttccaaggaaaaggaaccaacaagtgacatttctcctagtaaacattcctccatcaccgaaacaccattacaaggatcactcaattttggcaatgtggcaaatatgaactttgctgatgttactaagaatgctaatttgccaggcgtttgtgcgaactctaaccagtctcaatcgtccactaaagaggaacagttagatttattatccttcttgaaaggtccaccaccaacatagttcgtaatgcacattgaacataagtaccatatatattcagtttaatttcagttgattgatatatcgtttatcataaaatgcaccaaccgaattaggtaggctagtccttgttaagatttatatcattggctatcaacttttctagcattttccgtaaaaatatgataattaacacagcaatcttcaaatttaaaggttcaagatatacaaagggagagtcttttcacctattaacattctatctccctaacgggtacacttcttaaataaagacattgaagatgtcgagaacacttaaagtatttgctagttcattcaattgtgctaaggtgttcccatttgatgacatagatacacagaagtccatattagagcagttgatcccccatgtttcacaccatgatatctatatattagggtttcaagaattgatgtcgatatggcagggttcattttccaatatttgctttcaatatctcgaaggtctttcaaagctggtcttgaatcgaataaatacggaggaaacaacattcaaatgtgtggacataaactgcctgggagccattgggctaatggttttttgcaaggaagagctggaagtaacaaatatcttgaaaactaatgtgaaatgcggtgtgttttattctagtttgaaaggtgctagtgttatacggttctctatcctacatgagggcgttagtgacacaattacatgtgtaacctcccatttagctgccaatgaagggttgatcaatctggagaagcggattcaagactatcatgccataatgagttcccttaggaatgagttcggtgaaatggaactaagtcatgtcatattcaccggtgatttgaacttccgcttgaataagttcttcggagatgtagattacagggaccctgatataatctcgcaactattaaatgagaacgatgaattaagagatgtgatgaaatcagaaagagcgttcacccagtttcttgaacctagcatccagttcccaccaactttcaaatataacatctcttcaccaaaagatgacatcgctcaggatccgttatactataactttaaacgacagccgtcttggtgcgacagaatattgtattctaatatcagcaaagacgctaaaccaacactatacaaagcaattcccaggaccgaaattttccattttacagaccaccaaccagtaattctttcaatagagcttccccatattgaaccaccaaacatcacaagaggggtctcatcttctccatctcccacctcgtctacgagctctctttcacttagttttggccgaatggtagattatataataggctactccgggtggctctatttcaaacactcaagaatgggcctactggtgttagtactattttcgatatacctctgggcatcttaagtcttaaatatttcacctgcgatcttactgcgggccattatcatatttacatagtcttctgcccagaaaaattatagatcatagaattgaagaacattatataacgtttttctatgaagtaagatgatgatgatgagaacttggaaaagtgagaactaaagtcactggaaacaccagatttagtcccttgtatgaaggtaacgagtcggactttattaagaaaaggttctggcatcgcacaaaatatggcaacaccaatactaaatgaaatggatgcggctaagaagagacctgttaattacaagcttttgcaagaagccaagaagagcaaaatcagtgcgaaaggcatcggaaagatgcgcgacaagcaagggttccagttaaaaattcaagatgtcaacggctcaagaaataaacaaacggaccctgactatgatgttaagatcgaaggggcactgcgcaagattgtaccatattttttcacttacaaaacgttttgcaaggagagatggagagacagaaagttaattgacatcttcattgatgaatttagagaccgctctcctgaatattatagaaagacaattgcagcgggtaaagtgtacctcaatgactctgtggcagaccttgattcagtggtacgtaacggtgatttaattacgcatgagattcatagacatgagccttcggtgacttcaagacttataaaaacggtgtttgaagatgatgatctgttagtaatagataaacctagcggaataccggtacatccaactggtagatatcgattcaatactgtgactaaaattttggagaaagaacgaggctatactgtccacccatgtaacaggttggatagattgacaagcggattgatgtttttggcaaaaaatccaagaggcgcagatagaatggcagatcaaatgaaagctagagaagtcagtaaagaatatgtggcaagggtggtaggagagtttcctgtcgggttaatagttgtcgataaaccgttgagaaccgtcgatccaaaagtcggtctcaatgtcacttgtaaaattacggatgaaggtgccaaggaagctcgaactagctttgaaaggataagtttcgatggcaagactagtattgttaggtgcaagccattcactggtagaactcatcaaattagagttcatctacaacatctaggacatcccattgctaacgatcctatatactcaaatcctcacatttggggaccatccttgggcaaagattacgaaggagatttctcagatattatagggagcttagatcttgtcggcaagactgagtccgccgagagttggatgcatcctgattcatttggtgaagtcttactcggtcagcaatgtgaaatttgtgacacagagctatattcagatcctggtccaaatgatcttgatttgtggcttcatgcttatcggtacgaatccaccgagcttgattctgatggaaaaaaattatggagttacagaacggacttccctgactgggcgattgagccgcacagaaaatttatggagttggcgatagatgaggcaagaaattgtggtgaaactcaaactgcctttaatgtaggcgcactccttgtcaacggaactgatatactttccaccggttattcgagagaattaccaggaaatactcatgctgagcaatgtgcattagataaatacttcacaaaatcagaaggtgcgaaacttccagatggaaccatcatttacacaacaatggaaccttgttctctaaggctcagtggtaacttgccatgcgtagaccgaataatccaaacaactggcgctataaagactgtcttcgtgggtgttatggaaccggacatttttgtcaagaataataccagctatcacaagttggcacaatatggaatcgactatattctcattcctggttatgaggaagagtgcttaaaggttgcatgtaaaggtcacgacaaaacccagaactaagcttatcaaaaatcactggtgattttgttttgtaggaaactatatttgttaacatgcaattccaagataaacccgtcacaaagtttgtgaattgtatagtgaagatatatatcgcacacaaatgtcggcaaaacagtctaaccactttgaaatccaaccctgtttatatcaatccgttcatacatagacattttgtaattgaaggtatttagcaaaatccaagatgttagaaaacggttgaaacagcaaaaacactaatagcttctaaagcgattatacaggacgtttgtaaatgatccaatttgaatgtggtattacagagtaacagccaatactattattattattatgcacattattattggtgcttgtctgtgctagtttccttgtcacaattctctgaagtagttaccctgaccataccaatcatttgaaaagctctatgtgaaccttctcttacagaggagcatagaaaagaacttctgatgaaccgatgacctatatcaagatatctaaatctcttactcagcacctcaagaactgccaaaggatttccgaaatgatagacggtcgtattatctccaacgacgaaaatagaattgctgacctctatacatattcacaaatcatcaagttggagcattctattactgatttagtaaagcaactaaagacagttattgaactctcaccaaatatcaaacagtatcaccaggcactagaccagttacctacaatgtctagcgatttgatcccatcttttgatagataccagcttaagttggccgctgaattgacttcattgtatcaactgggtaaactagagctattcaataatattattcattacagtgataagttcaaaagtggaagctccacaccgatattacctgaactacaaaatgaaaaccttgatttactctcagccaatgttaccaaatcattacatataaattctcacgaaaattcaaaagctaccgatgaggaagaagaggaagacgatgatgaagatggatatgaggttatagataatgcagtgactgatctaaaaaaaggtaaagaatggcctccgaaactgccgaaaatcaaaaaccctgtgatcagggctcgtgtctttattcataaatcaatgattaacgataaactgtatttaactgaccaagaaattatcagatcacataatgaaagactggagtttttaggtgattccatattgaatacaacaatgaccactatcatttataacaagtttccacattttgatgaagggcaactctctcaactcagaatgagattgatcaacaacgagctgttaaaagaatggtcttttctatacaagtttccagatgaattgaagactcacaatgtaaaacctgatgacaacaaagatggaaaacaaaagctatacgctgatgtttttgaagcttacattggtggcttagtagaagataatggtaagaaaaaccttccaaaaataaggaaatggcttgcgaaattggcagaacctgttatatcaaagggactaaattctgacataacactagaaaatacgacagaagttgatgtaaacgccaagaaaaccctttactctttgatcggatatgcagcgctaaatctccattactaccctgtccacaaaccaacctctactgacccaaatgccatagtggaatgcaggattactggcggtaaagtattgggcagaggtgtcggaaagaacataaagatagcaggaatgcgtgctgcagaggacgtcttaaataataaggagctaatagagaaatacgtgagcctgcgagcttccctcccaaaatctgaatctgtgattaaggcaaacaatgataataccaagaagcggaaacacgaaggtcacagtaatgatcgcggcaaattaaaactactagcagatggatcttttgcattcaaatagttttttgttgtattttttcttaacgagtacgataaatgcatacaaattctaggcttaaactatctaatctataaactgcttatcagtatgtattctttttgagggtggtgaagacaccacgttagcgttaaggttgtgactatcatttggttggtcgtcagcagaagtaacggttttacgttttcttttgtgttctaccccttcatgttcacgttgcacaagtgttaatagagtggctattctcttagaaatatccaaaggtgtccttgttttaataaaccaagaaaatatgaacaatggacttttcagtatttcctgcttgactctttcatatagattactggcaaacaaacccaagttaccgacagtaacgagtaaaaatatatcttctaatgaattgtaagttcttctggtattgttgggaggatataatattttcaattctactaagggatactgatattgctgaagcttctgcttcaaaattgtttcctgtatctttagcttttcagtcttcttttcaccagcttcgatgtttgcgacatacttctcccatccttggacttccttgtagcgtttccaaaacgtttcagagtacctctgaacttcctctggcgttttcgtatgaattgctttggatattgaaacataattgtctctaccaaattttatgcatgcactgatgaaggctaaaaattcacgtttattccaattatagaaagattcttccaggaatctttgcttttgttccaaattttcatcagtgaattcttcagcagcgtcaatttttgcttgctcttcagcaatcttagcgtcaatatcatcttcttgtttttgtgcattgttagtatcatctgattctccgtccgatctggaatcctcttcgtcatcatcgtcaccctcactttcatctgcgtgttctttaacatcatatgcggtgattttgtatccgacacttttcttataccaaagttgttctagctcctgtagccggacaaattctggatgtgcaaactgataataagtcatacgaataactttaggttgttttggtaatttcagagctggggtgttgcttcctgaaggtttgctctttccattacctataacttctctataataatcatccactgaatacagaggctgttctcgtctacgctctcttttaggcggattgatccaatcaacagtatgatcatctggcttcttcttctcaaaatttgttccattccattcgtaagcggattgatcagccataccattgaacttttgtaggtcatcgagaccaagagattcatattttgcattaagttccaatgtctttctctcaccctttttcaaaatttcatcaatgtcttcatcaacagttatattaccagagccatgctgaagcatatctcttgctccaaattgtatcatatcaattaggtcatctttgttgttcgtcagcgccgaagtcttctttcctgtaccctgctgaattaccaactggtctaatctaagtttttgagcagccctctctatcactttctcttcaattgcattttcggtgacgaatctatacacaaacacctgttttttttgaccaatcctatgagcacgatccatggcttgtaaatcggcctgtggattccaatcggaatcatagagtacaacagtatcggctgtcactaagttaatacccaatcctccagcacgagtagtaagtaaaaaaataaatttttccgaatttggtttattatactcatcaatagcttcaactctttcatcatgcgaagttgagccatcaattctgcagtattcatatcccctgaaataacagtaatcttctaaaatatctagcaaccgtgacatttgtgaaaatataaggactctcgagccttgttcctttttcttttttagcaatttatcaagtacaatcatttttcccgaattgaagactaaatgttcatctgtagtataaggagggccaggttctgctccttcgaaaaggtatggatgattgcaacactttctcaactgcataacaatatttaataatcttgttttaccttctcgcttaccgacggctccatttacggcatcgatgtctttctccaatagtgatttgtaccattctatttgcatgtccgtcatccctacgtatagattaatctctttcttcggaagtaatgatttttcgacctcagatttcactcttctaagtaaaaaaggttgtaaaaccgaatgaagttgctgaacaacaacctcttgatcttcttcctttccgttttgttggaaccattcatcaaatacttctgagtcaccaaagacatcaggtagtaagaaattcaaaagagcccaaagttcatgcaaattgttctgtagaggtgtaccagtgattaagagacgatttttggagtaaaacagtcttatcacctgtgacaaggcgctctgttcattcttaattcgatgagcttcgtcgattagaatatattcccatgcaaatcttttaagtgttaacttctctttcaataccatctcataagaggtaattagcacgtcaaagttacatgttaaaatcttagtttcaatgagttcttttctgaaatccttgtcaccttgaagaatgactgttttgacttcaggagtccatttggcaaactctctttgccagttatctagtgtggatttaggtacaatcacaatatatggcccctcgatacctttaatataccgaagataacctaggaacgatattgattgcaacgttttaccaagtcccatttcatcagccaaaatcccagaaagcttgctttcatgtagagaaatcaaccaattcagaccgtaaacttgataatctcttaatttcccttcctttatgaaactcggtgattgtgtcaaaattgttgtatcctcttctaactcaacttcctcatcctccatcaattcagcatcttcttcttgttctgtctttctatagtgccttggagccctagcgagatgaccggctggctctttcaacgttccagcaactttgttttcagcatctatggtcttcagtaatttttgcatgtttttatcatatttggctctgatcccaataaagtgtctgaaaagatcagtaatttgcaaaaggtgcttgaagcgaatataagtgtcttctttattcctttgtttagctattttcggatcaacatcaagtaagaacttagatcttctttcggaccagtacttctcatcatgttgattattgctaacaggattctccatttttgtagcagatttctatgagtatttttagataaaggtggttagtatcttatgcagaggtccgcccaagtgtgaagttgttatgtgcttctagtgattactgtcatcctaatacgttgataaactcaacggggagaagcaccgaagttcatgacagatattatcagtaaccattgaagtacagttgaacataaagacatttagcatacctcttcctcaaccattgtaggcaatgttgatcgatgatgataggatggcaacagagaattcgatatccataggtttcttagtggagtgtggatagtcacaactcattattttttggaaatttacattttttcaaatcgctaggacaacaaaccgcgtggaaaatgatgataatacatgatctcagaacggacatacctcagagtagtctcattgactttaaagaacaaagcgtggcagaatgtgattagccttgcatctaccattagtacaaagcgcagaataagtagaacatgaccatttaatatttacacgattaagttgatatagatatacataacttgtaagatcacatatgtgatcaagaacgatatcaagcgcatactgattaagtggttcagctgccttttttagtaccgattgttgctctgaattataccacttagcgagatttggtatgctctataacatgtatttaggattgtctatttggatttgtgcaacttcttcttcgattgttactcgtattggatgtctgatcatgcttttcaggttgatttgtcgatattttggatgtgttatttccacgcatagatttatccgctgatttacttttgcgtttaccattagattgtatcgaagaagattttttaagggaaccaggcttcgaagatgggattccggtctccattcccattagcatctccgacgccgcttgttgggcttgtatcctttgtgattcttcattccaccacttcaaaaattttgcttcctccaaagcttcctgaatagattttgttggtgtgggtgtcgtttccttagcgacccaggataagttactcttggtagaggcatataatggcatagtttgcttcgtaccgtcacccgaaattgcgaccatacctgttggctttttcccgtttttcacagcttcatgcaacgttggaaatttggtcgaagctggctttacacctgaaagattttttacctccgaagatacagtcacttttgttgattgtttgtttgttaacggggacttcctcatatgttggccccaaactttagtcttgtcttcatttggcttctcctggaatttggcttcctcagccatccgtttaattttctctttttgagtttccttctttatttttatcttgacggtactatttgacttgttagtcgtttcaccaagagcagggaatgaatgttctgaactatttttgcgaaccagtaacctgttcccgtccatgttggtatgaatttcatgcgccgctttgtcatctatcgaagcagctcttgttatgctggatggtcttcgtttcttcttcttagaaacctcaacaaaagtagactgatcatcgtcatcatcaattgcggaatctgtcatgttatatgacttattccaagcaatcgaattctgggctacagcgcttggttttctaatatttaccagattctcattgatggatgagcttcgtgtagttttactgatgctgggtttccttacatctaaaccactcttttgtctatgctttttataaataactgagtctaccaaaatctccaatggattttcctccgagatgaaatgagaattgaaagcgacaatattcttttccagttgacgaatgtaatctgacgctttcggtccataataccaactttcctgtgagcacatgcctaattctgttctaaatttttgctcaatggatttccacatttctgatgtgatgttttgcatgatatgctctacggtgtcagagctaaataagacagaaggattcctgaagatatactcctgacagttggcggctaaatccggtaaattaaggtcgctagctgcaatccagaaagcaataacattgtttgaattaactgatgatatcaactggctttctatatgttggactaacgtcaaaagcataaatttatctgatatttcaagcatgtgcaataacctatcgtgatacctttgatgtcccatattgaatgcaattttatcaagtacctgagtagatttcttttgacaggatatattatagatgcaatcaagaatgcttctgcagatatcataagagagatctgtccagtccactttatgatcgctgaaattagctgaccaggtttgagagaaaagtcttctgaaatacatagaatgggcctgtaaaataaatgagtaggccagaacactcttaccgtcctctaaaagaagggtgacattcggtgagactggaaaatcaggttgtattgaaattttgatgtttctttctaaagtacttggttgtgtaaaaaaactcggtaagtaatagacatcaataaagttctgaagagttgcacaattgagagcttgcatattttcgtcggagactgaataataacaagaaatgcagcttttgaaataaatgccgaagtcctcaggtccgaagatctcgagcgtccacacataaccattttctgtacttagattcatatcaatagcttctaatttgttcctccaaacaatttttccattagttattagttccaagtaaagcttttcctgggcggctgcaagtattgccctatggcaagatgtcaaccttttcccattaaatatcacatcaaggtcataattgtcatttaacttaagattagattgttgtttaaaatcaggttcagtaatcattgcagtatgttcggctgttaaaacattgaatgaagcaaacaatggatcgcaagatacctgacaagatgaggcacctgccatactatcttgtaacttggtgaacttacgacctaacaaaggacttgagtaaatatcacttttcgcagttaaaacaataagctgcccagcactgcctatatcgaaagatatacacttatcccaggagtacttcggcctccagaaacattgtggtataggtgactttttgaaatccggaatacaagcaacggtaccgtcatcatagagtaacatcaggtttttaccatgtgagtctttgcatttgatatcaactatttgatgatcatgaaattttcgactgaaaaacttgtcgaaagaatcgtgcagtgaaggtgtcgttttaactgtcaatattctataattcgtaagcgcaaatagtcgatttccaccgcataaaataaaagtaacgaggtctgtacagacaagaacagtcggctcgtttatatcagctggtaaaaacgaggtaactggttgtggcgaaatttgtcctttttgatcgagataaggggtctcttttttgaatttactagtagatccaaattgaccaacgtctaatccccaagatttgattgaaccagattttgatagcacgcatgtgtgtatattcgaacatgcgattagatcatcttttccgagtccaagctctattgaattgggttgatctgaaaactcggtggttttagggtttaaacccaattgaccatatttattggacccccataaaagtatatttccattggttgttttggcaattatatgatgattggagcacttgatatcttgtaatttcttgtcagagaattttacatacctgaagagatctctttttccaaacaaatttaatttcgtagaacggccagtgatgtatgctgaatttgttccatccttgtctaccatcaataacagagagtagtatttggtcatacagcatgatttaaatcttagatcattatcacacatcttccaagaatcaatttcataccatgaggttaatctatcattattatcaccggtacctaactgcatgttgacattggaaccaaaattgaaacatctggagtaggattttccactcttgacatccttattgagtagtttcctcttataccctgccttattcataaccatcgattgcaatagcagtaaaggtgacataccagatttatcagttatttgccaggatttaccagcatcatgcggatcctgtaggcttcttgcgtacaacttgtaacatttctctaattggaagcttagcatacacaaatgaaacgcagtatatccgctctcccaatcttgatccatgaggttgatccttttcaactgtgaatcattagcagctggccacatggacaagtgatacgaaagagttcttcccatacaatctctcacatcggtcataatatagttgcctttattgacgtcctcccaacggtctgatatagtggatacttaggatgttcttccaaaatttaacgttgtttataagatacctgatgaactgaagctactttctaacccagcactgtgatgtgccccatacacgttcctcattcatttactatatatacttcgcattaatcatattgtaagttgcaagataaagttgtccgggtaacattttcgaggaacacgatcaatactcaataagtgcataataacccataatatctcgtaacgtcgtgaggattgcgcgaacttggataaataaagactgagagttatcccaagaggtgagttattatgtatcatgtaaaagagtagttatcaaaaagtatagagagtagcgcttgaccgctaagatagaaagtgtgatttaagaaagtgaaaagttgaataaattagaatactctctcagtcgccaatgatgaagtatttaaggttagcttgacttttggacccttcaaggctctatactgggacatgttatcgaagtatctgtcgaaaagtacagcagaatctctcgggcctcccttagcttccggatggaattgagtcgagaagattggccttgagacatgaatcataccttcattggacttatcgttcaagttttggaagaaaggtttgaacccagattctggaagagtgtcaacatcaacagcatatccatgattttgtgaagtaatgtgacattgaccagtggtcaagtccaatgctgggatattgtgagctctattaccataacctagtttaattgttttaccaccagatgccaaagctaacaattgatgacctagacaaataccgaagattggcaaatcttgcaaggtattggtctctaacaatttcttcaattctggaacagtagattccatacattgaacaggatcacctggaccattagaaatgaagataccgtcgaactggtttgctactgatgtgattgggtagtcatatgggaaaacagtaacgttagcacctctttccactaaacatctaataatgttttccttgacaccacaatcaatcaaagcaacgttgaatggagttttcactgaggacaatgctttcacaaagaatggtttctttgtcgagacaatcttaaccaagtcagtttctggtttgattggcttagggataaaagaaccttgcacagtaattgtagaaggtgatgacccttgttctctcaaaatttgaacaacggcacgagtatcaatgccaccaatggcggtgacgttttccctttggcaccatgttgccaagctttcaacagcagtccagtgagagtatctccaagcatactcagcaacaacaataccgcggacgtgaatgtgaggagattccaagtacttcaataggttaaagtcatcacgttcttctccactaggcacaccgtagttaccgattaatggttgcgtaaagacgaggatttgacccttataggatggatctgtcatcgactccggatagccaactaaagaagtggtgaaaacggcttcaccactgcatgagacaggagcaccgaaggaatagccttggaactcgacaaacccagattccgaatctggatttgaattattataaatggcaaatttagctttaggagcagtacttttgaaattaggcattgttatttttccagatatggtcttgaatgtagtcttggcaagtgtatgaagagaagcagagtctaaacatacaacttaaaaaagagtgggataaaggttttttgagatttaagctctggctcaaacaatcagagcaataaaatttctttaacgaagaatgggaattgttagttgagaagagatataaattcaaaattctctaataatatgatagcagatttcgattgatgatcaaaatttttagcaatcgtaaagtcttgactatcaagttttcagtccagtctatgtgggtttcgtttgcaacagctgagtacggtttgtggaagaagtttataatgttctctggaattgcactgaactgtcagaaaagagataaaaaaacttgctatggttcttgtatttatatcactatggctcttatattttatcataaaagaaaagctttatttaattctcatcgcatttcttgagatagtgatgcaatttgaatgtcatctcgaatttgcatctcggtgactaaatagaaaagaaacgatttccctgtgaaaaaaaaaaaaattagcgagtcctcccatgtttgtatgtaatatatgggtttggggtttggtggagggtaactgagaatttggtgtttctgttgttcaaccaaatgcacgtgacttgtttagattatcatacacacttccgttaagttcgtagaggcagagagaaacaacataaataggattagttatcatcattacgttattattgatattagatatactgtagctattacttaaaggattaaagtcattaaaaattgaattttattgttcgaatttgtggtttcatattctacgtccaggcacggcagcaaagattgctgtcagtattgccgtcataatcaagaccaatagtaggcaccagagggctcgtcttatcattattgagttcacaaacggatgttttactttgcataatctagatctgcctccaaaaatagttaaccaccagggcacctcgttcgaagagtgaagtgaatttgaacgatgattattcatcgatcttagttccaggtcatcaagtttacgttttgaaactagtgtttgagtaactccactgaatgcgtagatgatatctactaagtagataccacatattatgtagtaagatcccaaaaaaaatggaacaatgcataccacccttattcccttcgagtagttcataaatattagtgtataaccaatccaaagccctaccagccaccatgcgagtccaatagtaagtctggaggcagtagaccattggctgaagggagagtttgaacgagagttgtatgatttatttttcttaggtctttgcaatacaatctcatcatgtaaattgtgcaatgcaacgcatcctaagaatcttgggaaacagtccacttctaagaattgataaacaatttctttaattggttcgaacacttcagggtcatgtctcttctcttccataataagccttatcgtatcgtttcttaaatatgctggaatttcaaataaaaatctatcactttgttcttgagagagtaagtaggtggatacaatatcttgtgcacttgatattagctgctttgtggtgagctttggtttatgatccttcgtaacattactcttgactaacccatctacgaaatcgctgaaatcaatttgatcgttgttcacttgtttccagtcctgcaatagctgagataaacgaggagagtccgtttcacctttcaaaaactgactcacacgctgtgagtcattataatccaagtaaccatcattcattagtgcctctagaagcattgccgatgatactgattctctcttgtcatctccattaccttcttgcaaaacagtaggagtttcaagcttgttaacatcaagaacagactctcgtatacccttcacataatctttgcacaatcgcagatatgccatcacatcagtccaaaaatcgagatacactatggcatgggggtattgggacaggtaagtatagaaggaccataaatccaaaggcgcagcggtttgttggtttaatacttcatatagagtgggtaagcgggctcgctgggaatttggcaatttttccatgactattgctcagcggtttgctaacactggaatggcttcaaagtgctgttaagatgtccggtatttcaataggagcagtttctttgaatatactgtgacaacaacaactacggactggttgaaagagataaattatatttctcagataacgtgtaaggtgccacttgcctgttaattgaagtatttcgacgaccgttagctacacaaactgaccgttagcaattgagtaggaattggtgagttgtcaatatgtctttctcatctctgtattttagaatgagttgagtttcagtttcatgcttttttttttttgtaaggccagatcaagaatttttctcgattaggaaaaaccagcatgtaatttgcatcaacaatgggtctaatagtttggaaaggatgggaaatcaattccaagtattcgatactcgagaattatatgggcaactttcttactaaaacaacttaaaaatatccataattatttactggcttccatctttcatcattagaagggccttatacgtgactttcgaaacttcattataaaatcgataagtaatggacatagaatcgttgattgacttacatataacatcagtagtagattacacggtttaacttcgtaaacctggggaaattttatgcattactatttaacaaatgctgaacaagcttcatgatttcttcgtgaaagaaagtatacatggatgatgaagctgacgtaataaatacgtagctcagtattctgtcacatcgaacttgcatgctaaaactcactttattaatatgttacaattataagaccatccatactgtccccaatacaagaacaccaagcacaattgtagtaataatacctgcaccggctttgtctcctgctgtgatgttgatgttcttctgtaagacatttgtggtactgacgtttagaccggcactagcatcaccactggaagacccaccagtgctttcagttaatggcgctggtagatcgtgaacaagcaattggttaatgatttccaaagcgcacgcctgttcaccaagaccatactgcccatcccaatcaccagtaaaccaatttaatccacaggtatggccatcagtaccaccgctacatgatttggctgctgctgctgcactagtgtctatgagaggggttattgtatccgttgtgaacggagccaaaactgaagtataacctaacattcttgagaaaattgctttaaagacacgctgatctgtattacatttgtttgaagcttggcatgtactttcatacattatgtcatcttcgaaaaagaatgaagtggccccacctaaaatttgttcggtacgtgtctgccagacatcagacccatttgttgcattgtacatatacgcgcatccgccaagaacaacaccatggttatagctccattcgtatttcacaatggaagtacagttatcgtcgatagtcgcaccatcgaaaacattggcctcttccttcattactacgaaatcaatatcgacaagccaatcgaagaccttttctgctacctccaaataagtagtgttacccgtatatcttccgagtcgtgctgccaattggaagagacaaccattggaaattgtgttcttataattgtatcccgagttccaggtaaagatttgccatcttaagccaccgttacaatggtctgaatcccaacgtgagtacatttgattgaaaacagcttgtaccatggccaaccagccaggtgtgccgtcttccttcggatttgtgaaatttctttccacggcagtcattactgtcaaagcccaaacaccttgatcatcattaccttccaccatagtttgattacttggcatgtaatcataatcggacccagtttgtgccatcaaagcatcgtaaagcatatcttcatacgatgtattttgacatagataccaattttcaatcatacctccgaagacaagtccggcttcccaccaatagtatggcgatacaaacataccgacagtcccaccatatacgtcaccttcatagtaatcactaataccttgttgaatcaaagcagttgctgtacatatcgacgacttggaactagtgtccaaatcaatcgcaaggacggatactaccgttaaaaacaagctgtacaacggactaatcttcattatgatttccctagcgatggaggtaaatataataataaggacttagaccccggaagtgaacttagcagcctgatttggtgtaataaatagcagaatatccgaggataggtgaaagaacgctgaataattgttttcctcgtcagataccaattgcttactattggtatcttctgtctaaatttcaaatgccactgtttattaattattgaatatctcacaacagaagagggcttcagttatcattaagtataaactctgtgggttggtttcctgctatttctgtttttagaaatgtcaaatcaatgccattattttgcacgtgatatggaaatatttcatgatgagccccattggtatttaactagggtaaccggaaaatcatgtagggcagaatcagatgcgttcctattgcaggaatatcaggtttcaagaccataccgatttatcttgcattgcctttgttgaaaagtattgacaggcatcgcagaaatttacctgtaaattacgatgtattatacaaaattcctagctagcatttatcagctgacaactctagagctgtattttctgaggtggtataggtgaccgagatttaaagatgtaatagtgatgatattatgtatgttaattgttatatgactgcaagcccaaacaccacagatccaccatattttttaccatatgttggcataagtttcaaatgggctcgagtttatccaacatggacctaacaataaagccatgtgccatagacacaggcagcatgtacaccctgccaaaaaaattgtaggtaaccacactggtggctattctgaattcatttctcaggtcatcgtggttcttgatttgcaatgctaccaatacacttaaatgcttgtcagtagacttcaaaaatagttcatcatccgacactttgacaacgtcgaagaaatctgctttatcgcctacttttagcggcttcgcagaaccctcaaaacccttaatcgactgtatcccacccaaccacttactaagaaaatctcttgttttgaatgccgtatccaaccacaaaggtacgttgcttgtcatcaattgataagcttgagtggttgtcatctgcttatcaataagcttctgatcttgatggatgtaatttaaagtgttgagcggagcaaccagaggtattaggtctttttctgtgtttgttgaattcgacatacctgtatgagagtcgcagaactgctttcactaatcagtggattttgtttgatgaagtaaaatggcctacagtatttgcttatcattccaagaaatgttcacaaagtgggggagatctcagacattcgaactactttcttattgaatacgaccaaatatattttcttataatactttttgaccatagatgttcaatatgaactcgacggtggcttacaaatagactgatttcgatcaactcttattggtgaagactgcttggtaagcaacttactaatatatactttctgttctatctacagtaaagagggcactgtttggatccagtttgggaaatagctgatgcatttaaaaggttatcaaatgtatgtgtgcgttgtcggatcttaagtattgcattcgactagaaaaaattaagccaccttaatagcactagtgacaggtgagaaacgaccagcaggtttttctggcagtactgtttccttttggtacatgctgaaaggtgtatggatatacaattccagcacgaacgttaccggatattttcgaattcttgcccaatgctgccatgattggttcacacgctaccagagatcgacactggaaagtgatacaatcaaaaacacattttggttatttctcaatgcacttgaaaggcaataatgattcggtacagctctaggaccttagtggctaacttgctactaagaaggtatttcaacggtgtatactaatttattggacagaaatcaaaaatatgtgacattaatatacagacatgtaggatagaattcactgtatggagtttacacagtcttataatacataaatgagagatcacttttcagtaatgttaaaatcattcatcgtagtaattgttgctgtattcctggaaaaatcgtagaatattgtcatggaataggccagacacggattctgggaatctggaattgacttcattctctactctggtgatacccaaattctcaacaacttttgccatggcatctaaaagtaacattgagaattctgcataccaacggtggctccaacaacaaagcttgacgcaaatagttatgatttctagatcagtatcctcagaagggtttgattcacgttccattagtagaatctgtagtaactttcttgaggactgagagctaaatcttttctgtaggccattttggaacgcagcctttgcgctttggaattgtctcaaacggaagcaacataatccaattaattcccactctaaggttgtttctggcttcaattcattggattgccattgagaatggacccttaaatcatcatataacaacatgaagagattatcaaaccacctttcacataaacgcttccctcttatgtcccgagttacttctttttctgattcggtttcggaagtggcgtccagatgatcatattcttcttccattaaaaatagttcagctcttaattgtaatagtttctcccatcctaaacttttcactatttcacatagaagttcatagatccattgaaatgtgtttttcaaattggcagactttaagttgtacaagacggggttaacaatcttatgttcttccattactagaagtgaattgagattagtgacttcgtctaatacgacatctaaagggagtgggaggtgtaattcaacagtagcattgtttccatcagtattcaagattcttcgatactgatatttttgtgctaaggatgcgaggttcattggtaatgaatttaacgataacaaggcgtttttgttatcacctaacgcaatgtaagacttaaccaaataaaaccaaggcatgaaagcattcggggtcaaatcaacaccacgttgacttgcttctagtgctaatagtggatcgtcgtgtttcagtaggtattttgcttgtaggagcaacaattcacattgataggttggatccttaatttcctgtaatgtatcatggatcaattttattccatctaactctttatcattagtcaaataaattcttgcaattataatgttaactagtggaccaaaagcttccttcaattcatgcaacattggtaggcataaatcaatggattttgtgaagcgaacaatttcacataaagtttccaccagatagttattggttaaagtggaaggcatattaccgtatatacacgggcaaccaacctcaatgccacgagggaagaatagcgggaataatttgaagaacatttcatctacagaatccaattgaccagtcatcaaggggttgtaaattctagtctccacaacattgataacttctccatcatctctattctctaccatacacattatgtctctcattttcccactgatgaaggcttcagcccacgccatatcagtatcttcatctgagtcgaattgtagcttattacgatttttgtcaacaaaatctatttcaaaggtacctggcagatacatcttaatagtcatatcacattgtttgaagatattccaagtagtgaacgagatccattcgagagtgaatttaacattcttgccaaaccataactgtggtttttcctgaatgcattccatcaattgtttcaaccacactgcaatactagctggatctgaagtgtccagtccagccacataaaaaaaggagccgacggttttcttttgagagtcgtgcttcgcaatggtgaccaaatcctggggacctaagctagctacaaactccggatcagataattttgcaatacgtccattgaaagcttgaccgggtgtctcttcaacaactctgtaattatcaacttgcacttcattcatatttttctaagatcattggactcagtaggaagggtgtgacttcttaacaaggtgcctttttttgtcttggacaagttgctctacacatttcccaccaaagtagtcaatgtcctcagtttttgaatgaaggtatagcgttgttatgttagtaattgtgccatttaattcgaaacacgtcctagtgtgacctaaaaccccagaaaacgagagaatacatactccggaattgagtcctgtgatagagccattgttgatgattgatgttccttgatctgttactgctttatactatgtggtttatgcaaagcatgggacgccactggcaagtttgttcatcttgcgaaggtgtgcagtttattcatagaaatcgttttcatttcttcgaaagatgatattatagtaatgataataataatacgtaagtgtaaaagagaaaaaaagaccaggtaaccaaatatatataaaaagggaacagagcaagcgcaacacatacaattctgtatatgtttgtatatagtatgcactcttactcgtcaatcgaccattctttggcagtgagacagtacttttctggaggcaaacgcacaccccaagatgacacaacgttgggcaacggtttcttgtttctctctgccgcaagctgtaacatgagttcctttggagcagtaggcttgaattggtactgtgtgcgagctccgatcgctaaccgtatatcttctatcgaaacatccgaagcagaccctcctacgtactctctataagcaatagcatctttcaaaacacctttggtatatctatgagcgaaatccatcaactgtaacggcactttgtcttcgtattgcaacacagactgagaagcaagaagcaagtgaagtaatctcacatccctaggagtatctaacgtatccttatcaccgtcttccattgtcgagttaggtatctgccgaccctgtaaatacaaagaaattcccctacttattgagatcgatattgttcttgctatgcttccattgaaagttcgcttgtcatttaactttttcgtttctgttcgatgttgaaaaagtgaaaaaagtgaaaaaaatcccgaaatttggtataaaaggcggaatgagaaattaggatggattttagacccaaatgttgcgttgttgtaaggtacaagataagaagagtaacaacgtatacaaacgctactactgtaccacgtatttgtagtatacttttgaatccggtgaaaaagaaaacagttcaaaaaagagaaatgtctgaatgggaacccagcacagtgattggccgtaaggttagaattggcggtggtggtcctcgccagcaggtggcaagaacacagggtcaaatcaacgaggctagaaggtctggtatggttctgtccgtcgataagaagtacggtactactaattctaagtcctccccagaaggccaacggttgaccaaagtggaccgtgaaaccgatattgtgaaaccaaaaaagatcgacgtcagcgttggtaaagctattcagaagggtagacaagacaagaacctaacacagaaggacttggctactaagattaacgagaagccaactatcgtcaacgattatgaatccggtaggggtattcctaaccagcagattttgggtaagatggagcgtgccttgggtatcaagttgcgtggtaagaacattggtgagcctttgggcggtccaaagaaatagatttttctttcattaaaagattttaacggtagttgaaggaaaaagagcaggatatcttgtgtgtcctcttttatttatcctgtcgtatccgttccaatttcgtttgaaatgaatttttaatggataatgatcattgctttctctcataattaatttacgtagttactttcattattgggcctaatatctcagacccttcgaatatgtatttcgtgtgtacatgctactaataaacgtgtaatgccacacaaccagagctctatcactggtagtgaatgtcgaattacaaatatgttctatcacgtgatgcaactttattcctcgaagaatcgaagaaagaaaaaaatttgattaactagtcccataaactgacattgatgacggatacagcctaaatttagtatcaaatactcgtgaatctgtctcactcggtgttcctgatcgctgacatttctcaatagaaaacaatgtcgtttagcaaggctggtttacagcaaaaatggacttctgaagaagatatcaaaagtgttctcgatgagttgaaatcgatggacaaagttacctctttggatctctcaggaaacactatcggtgtggaagcttcaagagctctagctaaaactatcaaagaaaatgcttcgattcgtgataacgttgaagaagtgaattttgcggacatgtacacctctagattggtcgatgaggttgtcgaatcgctacaactgttgttgccagctttgcaagcgtgtccaaaattgagcaaagtggatttatcagataatgcgttcggattgcgtactattgactcattagaaaagttcatcagagaaactgtgcagttgaaacatctgattttagctaacaacggtatgggtccatttgcgggagaaagaatcggtaaggccttatatcaacttgccaaaaataaggaaaaggctggtgaatcgctgttggaaacatttgtctgcggcagaaatagattagaaaatggatccacgcgttggctatctcaaggtttaagagctcatggtgatgatttacatgctgttcgtttataccaaaacggaattagaccacagggttgtattaatttgatcaaacatgggctatctcacaacaaaaacttgcatgtattagatttgcaagataatacattcactgctgttgcatcagagacacttgcaaaatatttaactaattgggctcaactaaaggaattgaacttgaacgattgtttgttgaagggtcctggttctcatgcagtcttgaaagttttgaaggagaataaattcgacgatttagaaactttgaagttgcaatacaatgaattaactcaacagagtttagaacatttattaattcctgctttacaagatggtaacttaccatcattgaaattgttggaattgaatggtaatagattagaagaggattccgatcctttatcgatattacctactttgttcgacggcgaattagatgaattggatgatttggaagaaattgactccgaagaagaggaagaaagtgaagacgaagacgccgaggaagaagacgtgtgggaaccaacacaatttgttaaggatgaaaccgtcgatgaattggcatccgaattggcaaaaactcatttagaataaataaactaatacttattgatccttgcataaatgacgtcctacattccaatttcctgttgtaatgtaataaatagctaaaacctgaaacagaactcattatatttctcgcaataccatcaacccggaatgtacacatacaatattgtatcattttttagactatctccacgttcaattcaaaggtatctatcaatttatccttagcacaccactgggtttctagccaactttctagttgtttgggtttctttttagtgagtttatcaacatcatggtacgatgcgtggatgcatagtatcattggtgattccaacgaccatatgtcccatagagctggaattgtttgctccaacttatactcacccattgagttcaacgtgatcttgtaataaaccaaagttaaatctagtaacttcattgagtcacgtaatatcggttctgtcggaagaataaggtactccaacatgcgacaccattttctgtcattgctgtttgaaaaagctttgatcagatttacgaaagtaccaaatctggggtatagaacgttatgcaaaacaggtaatcctttgtatttcaatttcattaactttctttcaatcaatttaacttctggtgtgaagatattcacctcgggaaatattaccaaattctcaggcccataaaacttcttaatctttgataccgaaacgttgtcattctcatcatgcctgaatattgtccaaaaatgcttaaaactgggatacttcattaaacgagtccaacctgcgaaaattacattttcagctccgaactgggattgaatcaaagtataatcgataattgatctatggttgcttagtattagttggttcttacattttgtgttgattgtttccccctcgtaaataatttggatatcttctcttagcacactccatataatgaattcattaatccatatattaaccatggtttgaatcttctcagttttcataatacccctgtaataatactttgatgaaatgattctggaccattgattcatataccatatccaccctgctagcactgactgaagtatgaaaagtataaacaaaaaccatgaataggccacacattttataagatgcttgtcttgtatcgaaaaccatggtcccgtgacatttgtttgcaacgtactcagtacagacatggtttactagttcttcatcctaacagaaaacgattgtaatggatcgttttctagctagttaggaacagtttctgtgtttattccacactgacacagactttttaaccattttgttttgtcgcatgacaaacagtttcaagtgaaaaataggaaaacgtaaacagtacgaccatcgtttagtttacattagaaaaacttgtcaccgatacattgtaattagaatgtaaattttacgattgaattaattcatagagcctctaacagaaaccactaccgctataactgcctttctggttattctgcatcttctgtattcttttcagatctcatcaattttgctccaatctcattatcgatgatgaagtgaaaaatgaaatattttttgactaagctcatctcatcacttcgcatacatcgaaaagtacctgaaaagtaaggatggcagccaagacgacataatgattgccagatcaatgataaacaagccacttccagtcatgttaagaacttctttgcttcatcgtcagttgagaggtatcaggctaccagctgtttttagttccagtaagtttgcgaagtacaagttaatcccaccacctccaggcggagttaccggaaacgtaaacgataacttaccaaagacagaaccgaattggttccatgggtcgtatcactgggattatgaacgtatcactgcagtgtcgttagttcctttgacaatggttcctttgtatggagctatgtcttctgctacctttgcatcaggtttccccttcccagtgattgattctctattggccagtacaatactaatacatgcgtacttaggtataacaagttgcattattgactatatccctaagagaaaattcggattctggcacaaggctgctaaattcgctttggcacttggaagctccttcagtctttacggaatttatgttttagaaacggaaaataacggactaatagatttggtctctactctttgggataaagataagggggattcgagagcatatgtatttggaaggttttagtgtggtactctgtccaagcaatatgtaattcatcggagaattgacctccaagcagattagactctcatttatttattatcattattatttattagtgctacatctagtgttatttattcttaccatagtcttaatttagtctttgagtctgatgattcagctggtccttttcctcgccaaaagttcaaacggggtaaagcaatctaactttgaatagaccattttgggtattttgctgttcgtttttttgcccatgattacatgcgtttaaagttgttgatccaatctcattgtaactgccttttttggcaatcacatagattacagccggtttgacacaatttaatgaaataaaatcctgaatgcaaaagactttgcattcgtctctgctgaagaaaaaccgcctcaagttgaggagattactaaatgtgctttgggtttgaaacttattgaggttttttttttttcattccttcatgaaacttattcatgtcaagagaacatacttcaaaagtgactatataaaggcacctctctgtgatacaaggtgagattgagagactcaatgttgatttgacatccttcaaatttttacgtcaaagtacccttaatgttttgacaataagcattaacttatttaacatgtcagaagagatacccagtttgaacccattgttctacaatgagacatataatccattgcagtccgtcctaacatacagttcaatttacggagatgggactgaaataacatttcaacagctacaaaatcttgtccatgaaaacatcacccaagcaattatttttggaacaaggatcggcgctgctggattagcgttgattataatgtggatggtctctaagaatagaaagacgccgatattcataataaatcagagttctttggttcttacaattgttcaatctgctttatatctatcatatttgttgagcaattttggaggagttccctttgctctaactttgttcccacagatgataggcgaccgtgacaaacatctttacggtgccgtgactctaattcaatgtctattggttgcgtgtattgaggtctcgttagtctttcaggtaagagtcattttcaaagcagatagatataggaagataggaatcattttgactggcgtctccgctagttttggtgctgcaactgtagccatgtggatgattactgcaataaaatctattattgtagtgtatgatagtccattgaacaaagttgacacatattattacaacatagcagttattttacttgcatgttcaataaatttcatcactcttcttctatcagtgaaacttttcctggctttcagagctaggagacatttaggtttgaaacaatttgactcatttcacattctactcatcatgtctactcagacattaataggtccatcggttttgtatattctcgcctacgcgctgaacaataaaggagttaagtcgttgacttctattgctacattgcttgtagttctttccctacctttgacatctatctgggctgctgctgcaaatgatgcaccaagtgccagtactttctatcgccaattcaacccttactctgcacaaaatcgtgatgattcatcatcctactcttatggtaaagcctttagtgacaaatactctttcagtaactcaccacaaacttcggatggttgtagttcaaaggaacttgaactatctacacagttggagatggatttagagtctggcgaatcttttatggatagagcaaaaaggtccgattttgtttcttctccaggatcaacagatgcaacagtgattaaacaattgaaagcttccaacatctatacctcagaaacagatgctgatgaagaggcaagggcattttgggtgaatgcaattcatgaaaacaaagatgacggtttaatgcaatcgaaaaccgtattcaaagaattaagataaacactgtgtctctggtttctagttttttacgttctgttgagctctatcataccaatcatatattttagtaaggtatacatatagcagctcatagtatctgctggttctttaatttcatttaattatactttagaattactctttatcgattagtttcataatattgttaggaagaataagaccccattaaggatattggaaatgtggtagacccagtataaatttcttatgccgtacatgaaagaataaaaggataaatatcctagaattgagacaacgatcagccagttcattctgttcttgattataggaatattgcactgactatttcttaatgttagaagcaatgttggtgctatggctaagaaattatgatgcgatctgaaggccgtctcccacctaatcgcaaaattacgcaagaagacgacaactattggagcattgattggtatcatgaatattgttagcattaagaatgacacgttatagttgtgtatattggaatattttgcgttgttcctgtttgtaaagactgccagcttcatgcagttccacatttgaattaagcttacaaggatgaatgcgaactgatatgggacatagaccatgactcccaaagaaataaaacatactcccagtaattgcctgttattaaaaagtagtttatgatgtgtcatatcgttaagaggatcaggaaatgtgatacgcgtatatcttgtgattgctgaggaaattttaataactgcaaattcgatgacatttatgagtctcaaaataatgaataataatgcgacagagattatgaaaaagactggtccaatccaccacacaaatgtttcacgtagacccagcatatagttattgttcaacatatgagaatcgctacttggtttgctcaaagaaatagggtctaagtaatgcagcaaggtcaatatggccttatgattgattgctatcggtcctactgataaaaagaggaatattaatagactatgattattcaaaacattcatcaaaccagtatcaaagctgatgaatttactatcagggctgtcatagtagtaaaactggtagcataagactaaagcaattatcgatattggaattgatgcaaaagctaatctgaatctgatataaagcatcttcaatgttagtttccagtttatggatagtcttaaagaaatttcctctccaggtgggatgaagaacatcaaatttaatgacttgtctatggtatcatcaagtggtatgaagggagatatattgtgcatattgatttcatgagaacttgaggcagccaataaatgccatttggtttcatatggattattaacatactgtctcatcatcggtctgaacatgctatctatttcgtcagagaaagttgttttcaaattgaaggagattagcgaggaccataaatttgggaatgctaggccatggacaaaagaatgtttattttttaaggacattctaaaagggaataaagatagtttccacaatccgtcgcttgcagtttcaatgctcttatcatcgctatactttgctagaacaaagtcttccttctttttcattgagccctggaaaactattatttggaaaccctgcaatagagagccatttaatgagataaagcgaaaaggagacaccgattctccccatgacgagtcagttgggaatttttgtagacttgtggagtgaggaactttggaaaagcttgaaaatccgttaatacaatcctttccatatatgtctttacaaaagaaaatatcgaattggacgagtgatgtgagcatttcgaagctatagtcgacagacttagaaatattgaaggcatatcctgtggacattgattcagaagagtttaagacaagtaaatgattctcagggacactttctgtgtcgctgaaatctacggctggggcgcttaagtttttatcgatcaatttatctgcatcagtaattctttcaagtccactcaagaaaaactttcttcctttgcgcattctaatatctaaagtcgcggtttttcctcctgcatcatcattgacaatttcgagaatatattttgccaaaagatatctcaactgatcacaccacactattgccaaatggtcaattggggtccatagctccggtattgtagtagtgaatgtagtgaagccatttgattcaggaacaataccttggagatttgtataatcggcaggcaatatgtcatccaaaataccacctgttatggagatcacagaaacattgtttcgaaaataactgcccatatcattcatggctgaggtccagtatgagtttaccctgtcataaagttttagaatatcaccatcaaaagtgacgggggctgttgaatgaggggacgacaacgtcaggatggtatttacagactctggtatgtgattcggtagtgtaagcattaatcttgccactattcctcccatggaatgccccaataaaatgacagatttaggtagtgggcggttggattccttataggcagcgctttgagcatacattgacaagatatatcgtactgcatcgttcaagtatacagcctgatccagcattgtttgcccatgaaaggcagtgaaatcctcattgaaatcggctgtgaaataatccatgttctttgcattggaattttgaatagttgatttatggtcaaagtataaattggcacttgccgcagctatagatctagcttgtttgaaacttcctgcattgccgggaataaaaaggacaggtataccatcaagctgtatttcatcaccatgtttcggctctttatctttaccttgttctctgtataggtagaggtggtattttttggcgagtttagtgtgtcttgaatcaaatccatcaattctggcgtacgaagggtacatatagattgatctgcatttaggtgtatctgatccgctgaaattatgagatatatgagtggaggtaataatgcatagcagaagcaagcccactatgattacaagcgtgcttcttttccttagtttcttcgtcaatgtaggatacctgatgcgaacagcagactcagccggtaagtcaatttggaccattttaacaactggcttggtaaaccactaccagtatcctaggtattattctaaatttagtgttcctagtgaatgcactattctgggcatagttcatcaatcaatgcttgcaatggtacataatgttagatgcaagatgccgattttagatgcgtaaaccaaaaaaaaaagaagctgaagtcagttcagtcacgtgatgtataatgcagctcacgatgcttaataacatgaattatctatattgttacagattcgcataagaatgcggaaaatactaattacaagttcatatttataatgggatttggtgtcatcaaaagtttacaatttcgttatgcagcagcgttaggagtaacgtgtttctttggcggactggactgatttggagttgatcctggattcttcctagtgtcctgatgagatggtggggaagaggactgtgaatgaggagcattgttaatgggctgttgacccttttgtagcatttgctgttgttgcagggaattcagtttctttcttttgttgatttgttcctgtctatatttgatggtggcatctcttagttgctcgtatgctttggatcctaacatggttccaaatcttaccacctgagtatcgtttgaaatttggttcaacttcgccggttcgtcggaaaacttggacccgtaaatgttgtaattggaatcatatttccagtgataatatgacctggataaatcatccagtttagaatcatacacatttataacatcattatcgagttcttgcttctgtattccatccaaatcaataaattgtaataacatgtcgttaatattgtgatcagtttttctttggtcaatatattccatattgaaacgaccgcgacggcgtctgaaagcgattggaaattcacgagaatgagtatgaatctcgttatcaaatggattgaaaaattctaactttttatactcattgttctccacagcttcaccttccttgttaaaaacctttatatcattcgcagtgccagtgatataattttgaagattaggtgaatagtaggatgtttttacttcgaactttgagccagcaacagaagaaaatggagcatcttgggggctgacgttatctggtattgaaaggttgaaaacaggattgtaaggatcatcagtgaggttgaaaaagatgtcaccatcttcctgtttcctttttctcatcctgtcttcaacaaatttccttgtgcttttttcctttgaatgcaacaatttaccgacatcttctaacacgatatcaggtatcttagagttaggcaatttaacatatacttgagaagatgcctgtttttgctgttgttgtacattcgagacattggcaacaggcgactgagctccaatttcctgcgcagatgacagtgattgttctttgtttttatttgaaccagtttttgggcctttcttctttggctcgcttcctttctcatcagcatatagaccactgtcttctttgtgaagtttcgacgattttgaagattttgcacgtttaacagatgaatctgaagtaatggctgcctgctgctgttgtagttgctgttgttgctgctgttgtatctgtagctgtttttgaagaagaagttgttgttgttgtttgattgtacgcaccgaactcacgagtttttgtttctttgccgagtacaaatcctcgttatcggcatctatgcctaactttctcttcattgtcttcaattgggctcgcgcttggaagacgaacttttcgttttctaggacttctaatactgctctttctcttttggctacagtgagtgccaaatctttagtatattccaattgttggcatagaagtcgcaatttttgtgagttctgaacatctatccgccttgttttcctaggttgtcgaagctctctcctacggaaacacacatatggatcattatcgtctttatcattattacgctccgatttcaattgtgggaagatatcgcaaccatgacgtgatatcttgcgttgcttccaatgatcgtgtattttctctccgaacaattcgataagagtctccatatttttttcccttttacctagaggtcttttattgtcaaacattgtcaagaatggttcatcttcaggcatcccaatttccttcgcgagttccttttttacgccagaatcaccaacatcgtttttcaacatggttggttttaggtctgcaaatgaaagtatactctcgggatccatggacaggaagggttgcctatctttgatggaagactcaaagttggccataattaattcaaactcatcttccgttagaggttcgaccgaatccgccagggatttatttaaatctgccaaaaagatttcgtcttcttcatccatattatacaaagtaccacagcaatcttctaattgtgcagaaaactggatataactcgtaggacatttgaattcaccttggtaaaatctgtcaaactcgtcccaagttttcgaggcgtctggtgttggaataaatagatccttcttgttctctcgaagctgattggattgaagaattttgtataaatgctcttccttttcttcattcttctccacaccagtttcaatctccatcagctctcgctgttgatgctgggaactgatggccgaaacatcttcttgttccaaatccttaatttcatggctcttatagatccgaagtcgttgcttcacgctgatctttctgtgcctgaacctcgatgaatccactgcaggagctggcatactgcaatgtgtcaatgcccgtgtgtagttaccctgatagctatgcggctgaagccaaagaaggatctttgaattccagatttcaatagcgagaaatatgaaaggaagggtaactacaattatccctctaaaaaattggttcttttacgggggcccaaatttattttcttcctgttttcggggccaaattttgcgaaaaacttcactggcaagcaatcgggtggcggtgaaggaggcagaaaacaaggagaccaaatctaaaataggactgaagatagcagctattggtacggattttgcagaactgatgaaagtccttaagtatcactactgatggttgattctcagtaggtttgaacgagccaccggactgttctgaagcgcgtggttttcctttttatgttggttgtttgggtggaacgcaacagtttgtccggtgaatgggggtattggttttttctatattgaaatccgaacttatggaaagaaaaaaaaattttttacgtcttctacggaaatatgaacgtctcccataaccaccttggtagacaataggaatttctgttcacgtgacttccattgggtcaaggtaaatggtgatgccaaaaattgtatgagcttctaccaaaaagaaaaaaaaacggaaatcagtaacttgacatccgtaatgaagtcatctcatcgcttgttgaaagagtgagttatctgaggcaggtaaagaggctgagaaaatcagtcttagtcgtgaaacgcaatggaaacagcagaaggtggggcttcttttgccgagttaatggatactgtcaaaggtaccatagataatttggtaaacaaaagaaccttcttaaaggaacagcagccgttgtatgaacagatattcgataggataagagatgctgacacgagcgaagattcggaagaagaatggcagtatggtgaggtagtatttcagaatggtaagtttttccaaaatataggttacgattactatttggagaaatctagggaagaatgcctggtttttataaaggttcgattgaacttaattgccgaagccatttcacaatttgatgagaaactgaaagaggcacatggcacattgcgaaacatggagttacttcgagacggtgcaaaatctttgggagatacgaatgtttctaacaatgatgatgaccaggaaggtttctttgagatcagagaagaattagacgaagacggaaatgtgatacatgcttcaatgacgcccgccaataaggtgcattcgggcaaaggtaatgaagtccatagtgatgaacaacaattgtcactgagtcaggaacgtcaaaattgtctttcaccagagactgccttcaatattcagaatgatgatcgctcttccgcttcaggaacttcggaaactggcaataagacaggagaaatcatggaagcagacaagagtaccatgcaaatagcaaaggaaaacatgtacacattcgatgatttggtagatcagttagataaattggataattatgaagatggcgaaatcgacgtaaatgacgtagaatacgattttgatgggtatgatgaagaaagcgacgataatgaggaagatgaagattattccgtctccatagttcctgaaagagttcagcattcctttatggaacaaatacaggctttgagggccaacaaaaaacatgatctcgtacatacagaatatcgtaatcattcccctgagcaagaagctaagtccatacttaagaaaggcggttcgaagaagaaaagtgtcaactttgcgccaaagctagacgtctttgaagtggaaaatgtgaaacaggaaaccaaatctaacacatttaatttccctagaaacagctatatggagtcagaaatcatcgcatctgacggagaagatgttgaatttgaccccgatttgttcgcgcagatgatcggagccaaggaagccgacgtattgcatgaaaagtaccaacctggtagcatcaacggcttgaaggaatctgaagagccagcactcgccgcacctcgaaagaagcgtatctcaaggtttaaaaaggaaaaagccgccacggaaaaacgcgagtttaatactaatgatgttgaaatgtttgaaaaggaaccaattgtagaggctgtggtaaccgacatagttgagcgtgacgacacatcatcgatttcagttgaaaatactccgattaaaactggttcgccaaactttattcataagaagatgaagtccttacaaaaaccaaaatcgctgccaactaagacaccatcaataattcccactgaagaaatgaacaaagatgacagcggtgctgagggcgaacaaaacaactcgtcaattgcggaagtcatgaaggagaagcaagaactagttgagcctcatttccctgcgcaaaagtctaatgaaattcatgtccagccaagaatcgactttgcacaattggacaaccttgatgacatggcaagagcatatctcctaggattatacgatgacgatgtagaagatcctggcacagtattgcaagacacttctgactttgaggcttataacaagatggtagaaactttgaagcctgaattaaatcagttcttgaaggagaatgcaagctatgaatatgacattgaactgccacaaagtgcagaatcatcacagaataacgagagcactattattaacgaaattaaagaaagggatccaacgggcgctggagaacagccagtacaagacgttgaggatcaaatcatatacgcagaagttgagcgagaatatatggaacatcgtcgtcgaaatattgaaagattcgcggtcgcatccacctcatcatcctcaaacaccgagcacaccatggaacttgagttaaatgaagagttaggtaaagaaccgattgatgaatttggtaacccggtcacgaccagccgcttcaaagcacaaacgcttgctttgaagaaacatcatctatctcaacagcatccataatatctggtatgtagatatttctgtaaaaactttgcacgtgatatgagttgatagttctggattacttttagagaagtttaccacaattggtgcctctcaatgaaaaggtgctcggaccttcttaacacattttttgggcggaaagaagttccattttgaacatttttacacagttacattgaaatagccaaaaaaaaaaaaaaaacgtgacactcagcagcccgttcctgattcttggttatctacattttcttctgtaactgaggaataaaaaccttgtctcgaactacagaaaataacgcagcgtgtttaagacaggtctgaagtttattttatacagaaaatcgaaaaactccacaatcagtcacatcacgtgattattcctgtatatcaaaaactgaacagctttacaaaacgaaatcactgtcattggttcgtttcctagcggacagttgcttgctccctctggtacgcatactaacagtttgatatcagagagctgtattggtatatcaactcaagtgtcaactacatcaatcaggtaatgatgtaactgtgtcagttaaatcccatcagccgcatgacatgaaaaagccatttagcggtaggtaagccatatcctatggactgaatagaaacctcccgtcattaccaacccgcttggaaaagatttgtaaaatgattcctactcgtctcatttcaggtgatttctctttcccaagttgcgtatttcctggtgtctcagaatgactctcttttttttttttttttttttggtcaataggatagttgtacttcgatttcaatgtttatttttcattctttcgtgcatgaaacttccttccgatgaagttccccattcaatacgccctgcgccgtcacgctccaaaatgtgtgatttgtaatgtgcacttgactgtatactctgcaatcgtttgcctcgacttgtgtcctgcactagtttctctattctattccactcagattatcagaaaaacccaaaattaaacagaaacaagaaggaaagaagtatcatatcaattttctgtgtaatgtaaaaatgtgtcttcctctggggttttggaacctttgagacattacatgtttgcagattgaacacctttcttgttataaatagcagatgtagaaattattcacgacaccaaagatatgtaaacagatgaattatgttacatataatgctggtacgggaactctcatggctctttcatcttttatgcttgcacataagttaatggtcaatagcaaataagcagctagagttcaaatccatcttaatagcaacactaaagaagactaggcatccattcaataatcagcattaggaagagatacatccaagtgcacccaccaggtattttttttttttgatattcctttccgcttcatattataccgacacaaatcttagatagatattcatatgaacaagttgataatagatcctaaactgaaggcattgatggatccagattttgtttatgattccgatgagaatctgaacgtggaccagggtgaaaccgtgcatgaccacgatccattgcaggattttgacctcagtagaaagtacgatgcggctgtggcgggcgcgatatcgagggtatcctctccgttaggagattgcgacggtcacgtgacagggtcgtctccgatcatggatggtagtagacattcacttctgcataagcatgatcatggtagtggtcatggttacagtcacgatcgtaggcatagtctcgtagacgttcacggacatagtcatggaacccatgctacggtagagcctgatccggatgaacgctacctaaacgataatgggactttccactacaccagtcaattccaggcaagaacacacgctgacaaattcgacttttaccagggcccaaaggagcacttccatggtgcggtgaacaaatccttaagtctaagaaatgcagcagtgtttgacgaaggtgagtctaactcaacttcaatcatcacagatcagcatcatgctctcaatgaatcgacggtaagcggatcattcattcatcaaaatgatgcacatcacatacagaaccatgggcatctggactctcattcaacgactagcaagaaatctttttttgatgatgaaagaggatataatgacggaaatgataactttacgggaaacaatggcgatagatacgaaaatggaggtgaagatgaaagcttagaaagtgatgaatatgattctgcaagtgacgtctcagaggaatatgagtctcagttacataacctcttccataagataactaagtttaaaagcgatttccaccagctgatcacaaaattagatgaggcatctctggaatccgcaaaggcaagacagcattatctaaatgacatcagtatcagagaaaacatgttcatgtctgcaacgacgaatgtgcttctagatacggtatcaaaacttcttccacgtaaacgaacctcaaatggaatcaacaacggaaaaagccgtggatcaatgtattctaatcatcccttatcgtcggatgctaacagacttcacggtaagacaaacagtaacggtactgctgaagcaacaaaaaattcaaacccccactccaacaatgaatcaatgagcgcactgtacaacgcatccctggaaaatgatccatgttctaagctacctaactttggtgtaatattaatcaaatctcccacaaatgttgaacaattgtggagtgaatataccaaactgccatcggactccaatatgaaagcattgcttaaattgatgcttcagcaacaaaataaagataccattaagaaatcggatattgcattaatgaaacaaaggaaaacgaccatccaagaactagagagaaaatgtggatcttcatggagaaatagcgataaaaacttttcgagacaaattaaccgcaggaagaaaatctggggttgcattgaacaaggtttgaaagacgggttatccctacagacttgtttccccattcttgacaaatacgttgaagaaagggggaaaggtttgtcttggtattataatggtgttcctttcaagttagcggatctagcaccttcttatagcaccgaataagtgcagaaccgccgtctcatatattcaattcctttaaatacatattctttacataataaacaattctccacatatatgcgcctacgaatatacaattatttgcaatcaattgagaaattgttatctttccaattatccttcatggagattcggtatgtttttttactatttatcggcgactggacgtaattatctgtgaaaaactgcgtcggttagaccctaacatattatcctttttcacaattccacgcaggtaccaaaccaaaaaaaaaaaaaatacttagcgagattatgttctaaaaaaaattgtcatcagtcatctgacagttttgaccctcaacacaaaacaatttgtatgccaggtatagacaggggtttatccaagcaggtcgaagtgcaaagagtggagaggcccgacaatggaccaattagtttgtcttattgttggtgatacacctagtactctgttgttgtcttggagacttagtgtgtcaaattgttttactatattcgtttcaggttccttacctggcgatggaataatatcgtggaaatccactaaatcaagctctggctcctataagccgaatgttaccgttaatgattttgtagctctttccaaggtttacaagaccggcaaaattgatatcattattatatccagtcaatcgatatcccaattcaacaatcaattgagatctttggaaagatttattcacgatgacataaccataataatagacagtaatttcgcagtggagctcgagattttgagtttggctaagtacccaaatgctactacaatatccgttgttacggatgctgaggtgaagcgactttctgttggatcgtatttattgatgagtgaatcaacttcgtttaaattcgggatttcttatgactgcgacactaaagaaaaagttcttaaagagaacgtaaacaggtacaataattattcacaagattatggaagtaacttcaaggtcttgcttgaggttttgcggagaggagacaatatgagttctgtcgatgttattttggcagaaaataacgtgtttggacttttggtatgggagtggttgatacctaaaatttcgctgaatattttagcaatagtatttgaacacgattcatatgatgacctattggaaaatgattcgaatgcaaaagtattcagacagttagttcaagagttgatggatatatattttaagcaaactaatggggggataatcagatcttacatttcaaatgaccaaaaaaaaccagagtataatgctgtagtacagcggttaaaaaatagacaaaggagtttagaaaggtcagttggaaataaatatccgcattgcttgacaataaattatgaagcatactgtttttataatgaaattgcgtatccatcttcattattgttcgaacagtgcattaatctagcagacaaatatgattgtggtagcagtaacttgacctttttatcaagtctttattgcaggcaaccgaaccatggtggcacaccactgaaaaatgaacacccattagggtccaaaaaaacaagctttctgcgtggaaagaagacaatagttaatttcgaacagaggagtttatccacagactattctcaaattactaaaggaagaccaaaaaaggtgaaagtaaaaggaaaacaaaaatcttccaaaagtactttgaaagtgacatcaaaatatgatcttaaatcgccagacttgcaattgccacaggatatacaagaaatgtatctcggatgtgactccataaatttctcattgcctttgactccgaaaatgatagatattcaattcgataccacatctgatgatcttcaagaaagttcggcttcagacgtggactcggatgaatcaatttcagttcatccccgcagagaaaggatgttatctcaaaggagtttaataagggtatcggcaaactcaaatatgcatgaagacgacaatattgaccctagcttaaaattgcctttatttaaaggtttcaaaggtgctgtacagagacccatgacaaccggtagattggaaatgacagatttggaatggcagcttcgtaatggttatgcagacttaccgaagcaaatgctacgagccacaaaggatgaactcaaaaataatggtgcgataagacatcaatcgctagctggacaatactggaagctgatcaagcagcaacacataaataatgggcaactagctcgacctattaccagccaggaagacattcttaggtttcattgcgaaacattaacaaaatcacaagtacatctttccactactactaatcgatatggagatttggattttagtgacaacatatttgagcattggaaacaacggaaaggtagtctgtatagattactatctgacaggtgatttgaagatatgaagcgcatatatagattttataaactaccaaaagcaatttagaacaatcaaggaaaatcattcatacaaatcttcatctaacctagcggcagggttcgattcaatgaaatccaaagaaaccttgtgacccaaaagctctctaatattttgaaccttgtatttaatcattgtaggtctctctaaagacaaaccccaacccagaactctcatatcctttggaaggcccatggattccaacatttctggtctgaacataccggagttaccaatctcaacccatttgcctaacccttcatgccatgaataaatttccaatgaaggttccgtgtatgggttataggttggtttgaaacgcaaccccgtaacacccatcttagcgaagaagtcttccatgaattggattaagtcacccaacgttatattgtaatcagctaaaacaccttcaacttggtggaattcggctaaatgtgtagcgtcaacagcttcattacggaagacacggtctatcgagaataatctggttggttttggatctttggccaacttatgaagcatagcagcagatattgctgtagtatgtgttctaagaaccaatctttggcactcttcctccttccagttgtaacggtaaccaatcgaatcaaatttaccattctcgtgtacagctttgatgttggcgatatattctctatcatctggcatatcgcatttgattgggtccttcaagtaaaatgtatcttgcaaatcacgagctggatgttgttgtggaacgtataatgtgtcaaagttccagaatcctgattctacgtattggtttgatggcatttcagtgaaacccatagagaagaaaatttgtctgaattcctctctgaccttgttcaaaggatgcagagcaccggattgtggatcgataccttgagagttgaaattgaactctttgaaccttagatccttatatgaacctgtggctaccatttcagcggtaatctcagtctccagcttagtcaaatcggtagagaattccttgcccttgacaacgctgaatgtagtttcctttcttggggtgattaactttctcttctttagatcagcaacttctttatcactgataccagaaagttcgttattcttaatcttttccaattgttccttggtttgatctttcacttgggagacatctgcaattttgtcactaactttcaattcattttctggtgtctttacaatccatccgttcttgaaggctctagcttgaccaaccttcccgtcggcgcctagatgactggcaacatctttgatttgcaattttccaaactgatcaatcaatttcaagagtttcacttcatgagaaccatcggccacgatcgcattaccttctttagttaaactgtagaaaatggtatctttctttgagaaatcgatcttttcatgggatttcaaagaattcaaataagcagccatggtttgagaatcgatactggggtacagctcagaggttgagtcaatttgacccaacttttcgactttctgtaaaatttccaattgaatatcagacatcgtgcaatgagtattaattgaatatggtaacggatgatatctttaatacagaatcactactgtatcaaacgtttacgctgaattaccacgacaacgttatgccagaatctgccttagacgagtcaagctttgacgtgcccatcaagtttgttgtatttgatgttcgaacagaatctgatttttgttctgtacaattaaatttttcactagagtgaaaaagacctgtagtagtgacagacgttcaaaatgatatcacgtgagtcagtttgcattcctatattgtaatgtaatgttacgtacatatagcttcattataattacagtagtgtaccctttgattcatccagggtgatttggtttttattgagaagcgggtttgattcggcacaaagatctagccttgtgcaagcttctagcatgatctcttttaagagaaaccatttcttctcaagttgaacagcttctgtataatccttcttaagtttatcatttagttctgtgagccatttcttctcttccagcagtgtggactcatctaactgtgcatagtccacgttttccaaagctgggtcttctcttttccatatatcgatatagtcttcgtgcatcttattgagtgaatccttatattggatcaacttaagcctgtttaaatcttcaatttcttctcgctgagctagctgacctggaatatgacgaatcacctcatagtttatctttaacgagtcatcaatggctactatatgtcttttgttcccagatttgcgatcctcgtcagcagatgtgtgtagaggagcgttcttataacgagcaatggctcgtttacttctttgtacttgtatattcttaaggtcttccatggatctctttttgttaattatctgttctgctgtcagagccgttacagtcatcctcggtggcttatttgtgtttgtgtgtgtgtggagttttctttactgctcttttttgttgttgattttggaagtatgtaaagatgcatatgacttcttagtttgagactatattgtagagacaaagaagacgctaaaagataaatattgttttagttgaaaggggagctgtggagagtacaatttatttgatctttctgaaccgatgttaaagaataagtattagatggagaatctttcatcccgcacgtgaccgttgctttcttttctacgacgaaagtgcatcaaaacatccgaagctcagaaggtaaaaaaaaaaaatagttacatagctcccagctcatcgccttaacgaggtgatagaaagagtgtgataaaaaccatttagagtgcgtcctttgataagctaaagaccctcaaggacactaaaacccaaacaaacatggacagccttaatgtagatgaacttttcgccgatttgaagcgagtagtggcggaagagaaacagagcgatgagccaactaaaggtgatgtcgatggcttccatgatgacaaactctcagtagagattgacgacaaaacggaacagtttcaagccatcgagaggaacttgaagagactgcccaaacttcaaactggttttgatcagctgggaaccaacgggaaacaaattcaagttgaagagcaaagcaaggttatcaagatcgatgatccgatatacatcttagaatcacgtaaaaaatcagacaaggtaaaaccaccgacagagactgaaaaatggttcaccctaccgaaaaccgagatgactgccgaagtgaagcgtgatttgatgataatcaagcacagagccgcattagatccaaagagacattataagaaagataaatggaagattcctgagaggttcagtgttggtacaataattgaaggtccaaccgagttctacagcagtaggttaaagaacaaggaacgtaagaacacaatgttagagacgttaatggcagacgacacaacgaacaaatatttcaaacgtaagtacaccgaagtgcagcagaagaagacaagcgggaagaaagcccactacaatgccgtcaaggataagagacggaagttttaaactaatgtacggctaactataaatgtatagaatgtattatgtattcatccatattactctgcttgcaacagaaacgcatcacatttcgattagtagaagaagaagaagaagaagaagaagaataataagggcacgtgatcttatttgttacccggactcgtatggaaaacaacaaatcccacagggaaataaaaaaggaactaagaacacccacacctaacacgtaatctcacaaaagaaacgctgctctaacctctcccacttctacctctatctgttcatccatctcctacagtgatgtctaacccctagtaatctcggttgctacgtgtacctggttcttgtttgtttacctttagattagccacagagtgaaaagcctgactgagctgatagtgggaaaaaaagaagattggatagagagacgaagaaacaaggaaagacggaacagacagaccttgaatttaggttgaagaacgaactgctggaggatttccacgaccaatggttccaaaaaaactttaacttggctgaaccatccttcttgtggctagtccggcatcagcggaacacacacatacacacagtgggaataccaggttcccatttcacattttacacactgccgacgcagaaaacgacgtagaaactcacacttcgttcttccgcttatggtccctctgtttctttattttcttaaaacttatctctttagcacaagtacggtgactaacgctaccgccactactaggttttacggagcattccaatcgaaaactgcaattcctcagttattttcctctggaaatggaggttagtacgtcggacaaactaactagggtaccagaaacaagaaaccagaaaatctctgtaaactatgtgttttcagcactaggtcgatccactgtggctattatttgtactttgttttccttgactggtagttggctagcttgattgtacgtatttcacttttcttgtaaaaaaaaaattactgttcctactttctcagaatactaaatctaatgaattttgttaacggttttattttttgacttataagaaacgattctgacaatgagtccctctttatgtatattttgacataatctgctttcttcacaaaggtaagcaagaaagacgctttttttctcactgacctgtttgtgagtgtgtgagtgtactttgtttgcgctgttttgacctgcttcaatctggtctcgtaccctggaatttagttataataagaaggtaaaagttggaattattgctcgaggaaaggattaatagccagaatcagataggaaaaagtcagaatatacctaaggattaaaaaaagcgctttcgctgcggatttgtgttgacacattatattattaaacatatattttgattgcgatgggcacagaggaatattcaagaaagcttcaagaagcgattcaagacccgagcaccgaggcgttatggcgcatgtattcgaaagccaaggcctcgttgccctatagagaacgaatgtcaaatttgacgtggcgtatgatgggtatgaaactccacaagcatgcctcatccggcggttcggataaaaacaccggtaccgaggcatctggtgcaaataccaatactgcgactactgtatataacagctccaatggtggtaataataatcctttgaagtttgatggggtctcttttgcactacacgattggaaggcttcagaactggccagttcaaaccatacaaatatagcgttggatcctacgctctcgtttctcgatgggctcactgaacttccccctcatcattcacaacgtgagaatgagaacactacggaagcagtggaagacgttgatatgggtaaagacatagacaatgctgaggatgatttcgattacgttagccatctgaaacgtttgaacggtagcattactgagagtatcaatccaaagaatctaaatgccgatgtatcgatgtccaattactcatcctcacaaagcgaacaatcgaatccgcagttgcattcaacagcgtttgacggtcattacggatcgttttcggatcacgatagaaacgtaggatttatgtctatggatctcaatcaagttacctccgcttcttcagattaccatttgatagaacatttacaacaatcagaacttagctcacaagccgatgatgtgttgctcaccgatggtactcaaaactctagtgcatcgccggcaatgataaatgatggtaactctatttatgcgaaacacactaatgatccttccgatccatccttgcttggtggatttagtcataaggggacaggttcctttttcgatgactcggatatcatgacttcttttaccggctcttctagtctttccactttgaagaatcccgactatgactcccaaaggccaccattacattctactacttctaccgcttctttgaaagaaatgtattatcagcaacagcattctcaatcacaatcacaattacaaagacgtccctctactgcggtatcttctgtaaacccaatatccattaggaaaccaactttatcaagaagtaacagctcattcggttcttctttaccaaataatctatcaataggttctggaacagctccaacttcatacatgtcaacttctcaaggaacaagacgtggatctttggctaactccataagaaagaagccaattaataagacaggttctagaagatcatccgtttcattgaaccaacttaacaatgaaggaggagaaaatgccatgggtgctaacagtggacaagattcaggagttaagacagaaactcaatgttcaaattgtcatacgaagacgacacccttatggagaagagatcctcaaggtaacccgttgtgtaatgcttgtggtttgtttttgaaacttcacggtgttgtaaggccattgtccttgaaaaaggatgtgatcaagaagagacaaagatcatctaacaaatctaaacaagtatcgtcacttttaacaagtggattagcatcaagtaacaataacagtaacgcaagcatcaacagcgggatcaacgagaataataactctgcgatttctaccggctctccgacaaacgccatctccccagataagaagagatatgctttgaagaaaaaactgggtaaaccaacaacaccaactgcgaacttgcagttgcaaaggcagggaagcgcctctccatcactgccgcaaaatgctcttttcaattttcccagtctcggtaaagtagaatctttcaacgatgaatcaccagcaaaatccgcgcagatctcgaacaatttggaaggttttatggatcaagattttattcgcaaacaatcctcccaagtagagaaagataatcaaaaatcatcgcaatatcaacatcaagcggaatcacaaactgaaaatccaaaaaacaaagggaaaccccctggagatgtaaccagctgggaatggttgaccttgtccttataatttaattctctgattactttttccctaatctaataatatccatcgctcgattcttaggcaacaggtttacttaagattatattctgttcatagtttcagtttcccagttaatactaacttcaagggttttttataaagttatatcgttcatttaacagatgttgattacaagcttattattctcggtaacaactttggaatagagtatcttcttcacatgagttgctcatatgtatttttataatcacagactactaaaaacggagggaactatcgtgaaagggcaaaactgctattcaataacgtacttacaagtcatactcattaatatatatatacatgaactcataaagaggtcttacattggacctaatttttagtgtgcttcttctttgattttttagaagacttggacgcacctgggccttcaatgaattgtaaaagttcatcaactgatttgttggttagagcagggctgctgctggacgattttttacctttcttttgagaaatattagctggtttagttgcttgctgagcggaagcgagtttcttttcttgttgttgcttagtaataatacctttaatagtttcggaccattgtttcgaagtcaaggtagtttgatcatttaaccctaattctttcgagaaaatggatttggctttctcaatatgagataatgcatgagacatgtcatccaaagaggtatacaagttggcaatacgtgattcattttgaccatatggtaatgtttcttcgctaccagtgatctttagaagcaactcagacagcttgttcaaaatcttgatctgaactttcttatcctcagtactagcagcaatttggaataataaattgaatacattaaccctaccagagtggacaaaaggagctaaaagcttcaataattcatggactttcttcaatacaagcgcagagttgtagatagagccttggccgtattcaaggtatgccaagtttgacaaaattctaacggtttcaaatgaatcaacaccgtaacacctttcggaaagcaaagcagccttgttacagaaagtaacagcttgtgaatactggcccaatctagaatacatattagaaagtaacaaatacgaagaaacgagtgatggatgaactaaaccgaaaatatcttcacggaatgcaatactttgaccaagcaaagtgagagcttcattcattttcttcgcacgttctttggcttgctcttcttctttcgaagttgctccagaagatccggcgtcctcaccgtcagctgcagctttctttgattcttcttttttcttctcagcctcctcctcttcaacacttacagcattaactagagaagccccttgaatccacaactcttcagcaatcaagctttgaaattctgctcccttgataactggtcttaaagagaaatcattaatagaaaatgtttgttttggatcaacgattttgcttctcaattttttgtcttgagcttgtttccacttttcatattgttctttggtgaagaagtattccttgttgatcaattgaataccgaacttttgggcgatggccctgattaaagcatacttggaaaacctcttttcattgatatcgaaccattcagaagttagatcgtaacggaaacgaagttttgcttgaactctcacttcttcaattagttgttctctggtgtattgagcaaattctagctcattgatatcgaacaaagcatccaaattttctacagtgacactttcgttgtaagatttaccaaacaacaagttcaagaaaaatgcaactaaatgtggcacaagagttggagatgagagttttttgctttgttgtctaaaaatatgtttaatagaacgagcgatcatctcaagttcacagaccgcgatcaacccttcaaattgatctacctcgacggtacagccttcgttcctgacaggttctttcaaatctgctttgtcaagctggatttgttctttcaatttggatggaacttccttcccttgctgaacgtatttgttgatctcctcttgtctttccttgatcaatttttcaactttaacaaggtaaccagtttcccaatcttgatattccttgttttcttgttcaattttggaaagatactttgctctctcctgtttttgatcttcatatttcgctttaacaaattcgatagctttacccaagtaacgcatgttaacaccattggtgtggaacaaatcagtaagatgttgaccatcgtatggaatgtttgaatttccttttaaaatatcttctaaaaacaatgtgagaacagtgtcattcaagaatttggacatatcagcaacgttttcatcttcgacgccatcaatgacataggcatccggattgtagatgaaagaaacatcttctgatgcttcttgtagagtctttccggatgcagcgatcttctcagctctccatctttcaacaagttcacgacgaagcaacacctgtctgtgaggatacttattctctttaacatcatcatagtgagctttgacgaattcaatatccactgggttggtgttggcaagatccaaaatgtacgctctttgatcgacgccgaaaatacccttggatttgctggaaattctcaaatctacttcttcaaccttgtgttcttttagatagaaattctttgagaattcacagactttttcatggaacttttcatcaaacttgagtgttgcgacgaaatcatcataaccgtaattgacagaaattagagtttccatgggttcagcaacttctttatcctcttcatccacgataatgttgacaccgactggagtcaataatccaggtactggagattggactaacaaacggtgacccgcgtaatcaattatggctgtcaaacaatgacgaatgcccttcaaacctagacgatttagactgttgattatttgtaagtcttggttagcaacggcatacgcagcttcattaccaccaattgaagaataagtcccactcacatcggcaacgaacgagaaaattaatgatttgtggaaatatactgcattttctccggtagtacccgggtcgattggagttagttcattgttgaaaattgccatagcgcctttcactgcttcagagttaaattcatggatcagccctgcggtaatcttttcattcttcaaacggtcataggatgagttgatctctaaatctttaatggcttggaattcatcacagaagttcctttcgtcatcgttgttgaagtgctccaattgagtgcgcatgaaatcgccattattagaaggcaactgggaaactagccacggtttgctcaaaaagcaggaagcaggcttcacgtattgtgcgctatccgtggaagacaacttgtttctcaaagatgtgacgtgttggtggaacttttttgaaacttgagtcaaaaggtcaatgagattaaactttggttcgaattcatcttttggagatgggtcaaacttgacagagctagatttgttaacgtaaaaaccggaaatgcttgtagtaatgtggaacgtttcattttctagagtgctagcttgtaggtacaataaatggcccttattcttatagaaagctggaacagggttataggcagaaaaatgtagggactttagtactggagtgaccaataaattcccagttttcaaagatgcgatgttgaaatctgtgttggtagattccaataattcgttgcatgtttgcaaaaacttgactttttcttgatcggatatagtggtttcagaaccatttgacttttcggaattaggttcaaggctcatgtcctggaactgagaaccagaagagattgcaaactcggaaataccatcttctaactctgaagagaaccccaatgtttctctcaagccaacaatgtgttgcactgcggtgaccaagttatacgcctttggtttaaattggaaagtcaaagatgaaccgttaccagccaaatctcctaaaacgtcttcatcatctacaacacgactgttttcaatcaagtcatacgaggtgtagaatttagtagattcttcaaatgaaaggaaagtcctcaaatgagaaacattcgactctttacccaattgatactttatatcagaattcttggacttagtgtaggacggagtgcccttcactataacctcaatgttatctgctgacatttcagttggtgaacaaaaattcaagtctttaacactactttacgggactgagattcaagtccttttgcgaagtgttacttggtaatatgaggcaaataagattgttaaaacaggttcgaatgaataattaaatctcaaaactatactctcatgattatgctacttgaaatatttcgacaatttttttttcaacttttcattttccagttttcgaacgacgtccgtcatcggaccaaagttatgtatataatgatcacgtagaaagaagagttgatacaatgaaacatttggctagttatgatgttaatgctaggctaagcattgctaacttcaacggtaaatcattagctacaactgcctgaaagataacttgcccgtgcgaggaaaactcagtgcccttggagcactttaataaatggatataaaaaacaaaaagaacactccgatacggggagtcgaaccccggtctccacggtgaaagcgtgatgtgatagccgttacactatatcggatagtaactttggatgagtaactgttaccggaattcacctacattaccacggcaatgtcatgtgaatgccacatgtgcatacacatatatatatatatatatacattacatacattatgtctccataagtacaggctgatataacagctcatgctaatgaaaaagtcattcaaaattttgatgattccaaatgccctgtttacgctttttaaatatttaattttagtgatcagcattgagagacattcaaaatatgtttgcacataattagtttaagatggaccaaaccaaaaaaaccagactgatataaaagagtcattatatggaccgcagatttaagtttctatcgacaactactctaatttaactggtagttgtgtgctcagcttataatgaacttcataaagactgctatttggggacctgatcccaaggaacaacatcgtaaacttaaatcaatattaaggaagaatgatagacaactttcgaaatccttaaatgagttatcttcgttgaaagccaaaacacagcagctcatcaagcaagctgcgaagcagaacgatatcaagacagtacgtttgtatgcgaaggaactttaccatgtcaacaaacaatacaatagaatgtatacttctaaagctcagttacaatctgtggggatgaagatagaagaatgtttccaaatgaataagttacaagacaaaatggcacaaagtgcggtattgatgagggatgtaaactctttagtaaggcttccacagcttcgtgggacgatgatagagttagagaaagaattggtgaaatctggtattatcactgaaatgatggatgacgctatggaatcatatgaggacatggaagaagaagaagaaatcaacgaacaagtagaccaaatcgtagctgagtatactagtgagaaattgggtaaagtggaagaaacgccaaatgtcgtattatctgaaccaccaccagcagaacaagaagttgtccctgaatcaaatatcgatgcagaggccgataatatgatcaaggcgatgaaggagaggttgaacgcattacagggatagtatttttattatttaacatttacaatatactaagataaattagtacgatcggcgttagagtctacataaacttcagttttgccaaaatctaggatgttcttataatcttccgataacaccagccatggccgtagaaaagcgattctgtttgtcgaatcgctccatgtagagaaatagaggataagtttgaaatctttcaagcgtttgaaggggtagatgaggcgctttcctttgtaagttgatgttttacttgttgctttaactgctcatgtctgaactgttccatcagcatttgcttcagttcctgtttgtttttgacccattcctcagctttccctaaagtgccatcgaccacgttcataacattcccgaccatatctagtgcttcctgggcaagaagtaaggctctcttattggaggagattcttttggagttaggtttttcggaattgatcatccactttgttggtagttttagtaaagattctcgaacctgggacctagcaggttctggtaaagagtttcctgtaaatcttgatacaacagagtaaacttttttcaacgtaccgaccacttccaactggatatcatttgcagcagcatcaatatctaaatcttcttgttctttgtttgtatcatcttgctttcgattacccgcttgctcattaagctgggatgacgcatcaaagaactgctcgtcttcttcttcatcacgatcgtgccccggatgttcagctgatgaagtagtttccctcaccgagcaatggttccgtggtcgtacttcagcatctatcgagctgctgattggtaaaggtgaccgacgtcgtagttgctcctttttcactacatcttgaagagacatcaccctttgcgataattgtttattggctagtttcaataatcctaggcatgtcattagccgcttcttcgattcgattgacatattcaactgatattccttcaagttttccttaatccgtctccgtttcgatccacgttcttttcccgtaacacaaatctctttcccttggaccttaatatgttctatatccaaaccatgaacacaagcatcatcgctgtcatcatcatcgccgttgctttgtgtatccacctcatctatctttcttttcgcagcgccgatccatatcccagaagttttttcgatcttcttcaccagccggtccgcccttctgattaattttggatggttcgtacgtgtctgctcatataaatcaacggcactctgcttcatcttatctagtagtctctcacttttaccactgctctcgctgccactcggtgtaacactgtaatcaccgtttcgcagcttatccaaagcctcgacagctatctcttctgagtctttactcacagtaaacttaatagtagactggttacctctatcctcagacattttccgtaccgttgaattttatctttccttgccttattcgagggtgagtcagcgatgtattatatatgaaaatgcgcctgacctttcttcaaagtcccctgtgtttacgctcgtaaggtctgtttcttatattttcacaaggtctgactccacaaacaacccatatgaattaatcactcaaatgtaacccttaccagaccaaaaaaagtgtaacgtactgatttaaaatgtgtggacaaatctaagcacaaatcgctctggtatccagatatataaacaaataggaccgtgctctttgctatttcctcgtatctcatcttgtgaattaactaatacacttttcacattttcattttttcatttgctttccttttcttacattgttctaaaggatcaacttcggaacttagcatgagaaaaatgtgaaaaattaagaccacacacggatatgtcacagtaggaagaaaatgactaccagtagtcggaattggtggaaaggcagcttaggcagtggtgtgtgagacgtctcacggtgtgaatgatatgcagaaagaagtgtttggattatttgtaaaaccattgagccgatattgcagtttccagcggggctacggtcgctgggatgaattagctgccaagtattattataagagaccggaggtggagagggaaatagctcctgcgaaattgccattgttgactgtgccgaacgtgaaagatgctaggattagatgtggatttcgtggctcagaggttgggaagttgctcgacgttctattgatggatgtttacagcacggataagagttggatggagcaatggttacaaagggacaggagcaaaacgagtttggtacgccatggggatgagtttcgtgttgatagtgttagtgggttggataatactgtgacgtattatttgcccagcccctggctggcggaagctgaatgtgaaattttggaaatcagtgacgaatccaaacagaccctgaatcagggcgctgatcaatgtcatttgtatgtggagaagcagactttcccagagcccatttggcctagttttatggtggtacctagatccggcactgcttctcattttgttgattccacggattcatcatcagtttcatctttacatggacatgaaattgatcctgtagcggcatttgatgtctcattgcaatttgccaaggataaatccttagtgtcgaaatatttggagtgtctagacagcactaatattttaaatatatcaaaacaattgaagattagacttcagggtaaagaacaaatattctgtgacttggaaagagcagtcttgagagagatctttaaggaagacaattcagtggaaaaatacgagaaattgaagaactctaaggcgtcagttaacggtactatagaagagtggtccagagaagcacacaaagagttgcaaacatctatcgaacctctattatctgattttgcttccaaacaactttccctttggaaagtttacacatattccgaatccaaattatcgttgaaattacacgaactttgtaacattacgaatgatcttcaaatggttcaaaatttatcacatatttatggatctttaggcatacctcaggataagctatccattatagaccctgattatgctaggaacaaagtacctgttttacacaaagaaattaataaggcagtttacttgaatttcttacagttgcaattcccactaatagctgtttccattggaggatttgtaacagagttatgtacagcctactcgatgggagcattatcttcgttaggtattgttttaggcctgaaacgtgtaaaggatacctggtattccatgttaaagcaattccaattacagattagggaggaatgcaggataggaattgaaagcaacaaacaactactgttgcataattgggagatttcgtatgccgagagagaagcagacctcaaaggcaaagttgctcttttgaaagaaatagccgacgatctcacgtaattatctatctgacgggaaaagaatctattctttttctctatatagtttggtaattttaactaaatggaaacctggtatatatattcgttatcattgactgtcttgtatctaacccatgggaaagattggtagtttaattgaggttcttcgatcttgaaatactcaacttttaaaccgctcactgcataataagggatttcaaacgacatagcaattaacgcgaacttgtctacatcttctttttggttctcattgccatcatattccgtagtttttccatggtactgatcccaaattctctctagtttggggccagtccttaaaggtggtgggtccatggaatttcgtagctgcacctctaaagcttcatgaatctggcggtcccatatttcaaacatgcatttaagcccataattcttgtttccatgaccacccttcaaattgttaattttccaaattatcgaacccgctgttatgtcgaacacaacatctcctatatcgcttttaaacaggggcggcttttcgaggtcaatattccactttcgaataactgactttatcggaattttaattaaaagctcctttgcactatcctgagctttgaaatgcgtagttatggcagctttcaacaatagcttatcctgggtttcttggttctttctaggtttttgggatagcccgaatgactgtagttttataactggttcatcaagtagcggtctattcaatttataattacaaagctcaaattctccatccggtggaataaacttaataactggagattcttccttgattaaggtatgcaggtctacgcattcatggaattttaaacgtttcatgaagtgtacattcttctgcatcaacttattcaatcctatactcaattgaggcataccagacaaataactccggcatattattgttccgttgattacattatttctgaccacaccttcctcgaaatccataatgaattctaatttctcaattacatcaagaaagaattcgttcttaccgtaatggatacccttaggacgccatgagacagcagatgtcatcgttcgaagaatataactgtttatgaatgtttcatcctggtcacctggtggcagctcatgtttttcagaggctgtattctcggaatcatcgtcgggtttgataacttctacctttatgaaatcatgtataatattatagtttgtaacctgtatgataccataatcggatgattcctcaataacttcgaaaattaaatggaagttatctcgtacattgagcttgttaagcttcatgcccataaatttcctgcataactggtagatttcatctaagtaatgtaacacacttatgggagaaacactattattcacttgcattatcatagcgaaatataggttatcacgagttatcacagcgtaatgccacccattgccttcgaatataggttttgtgcatcccttatgatgtttaaggttattctgtaattgaagtatagcatcatcaaggaaatggatcggtcgtagtgctcttcttattagcggttcatacgtctcatcgagcaaaaggaaacatgatgacattatgacaaggctgatttgaccatcagttgatagttaactcggcactctaaatttacttcaggtctcggttaggtttgcagttactatatatgctagaataaatggctttgaaggtgtttgttcaaagcacttttgataaaatggtgcttcttgtgttttgtttcttctcaatatttttagttaataaagatttcttacatcttggaattctatcaactacgcatagagagatgctggaaaaggtaataaatgccactcttcaagcactgaatagtatagacatgtacaataagatagtaaaacaggtaccagtgctgttgccaccaaaacttctgacacaagaactcagaaaattgcctaaatggagattaatggagaatgaattggttagagattataagttcagagattttgaagagacatggagttttttgaacaaagttgccatgaggtcacacttatggggccatcatcctacaattactactacctacaacagagttcagttcagactcactacgcatgatgtatctggtatttccgatgctgatatcatgatggcttctcggattgaaaaatacatcaaacaaatcgatcccaagaagggcatcctaataggggataaatagaatgtattaaataaataaataatagtgtacttctgttttgcataataccttgcaaatacatgctgtcatgattcattccttgcttagtcttagttatgcctgtacgtttctttcattgctagaaagaagtgacatactgggcaattgcaatcatctcttactgctctccagcttcttctcaagtttttcgaactccgcaagtgcaatcttctcctcaggatccaagatctgaaccacgtcctctacttcttcgatgtaatgctttaacatagcttcaataccatgcttcaaggtatcctcactggacgaacatgacttacatgcaccttgtaacttcaaataaactgtccctgtctccggattccatccacggtactggatatcaccaccgtcgtccataatagcaggtctgatccttgtctgaatcaattcatcgatcatctcgctgatctcttgctcatcttcatcgtattcaaatttaggaatgtccacatcgtacccaacttcggaagactttttcacgtcgaagaaatctggtaaaaacgtgggcttcccactggctaaatgttgtaccaatagatctatcaccgtaggagtcacttggttccaatgaatcagttcatctttatttatagtgacgaaatcatcaccgatcatcattgcttcaacaccaggacattgctggaacactttagatgggaatggagcatgtttcaaaagctcctcatcagtgttcttgatctcaacactctgtgtgcctttctcctgtagcagccccccatctgtggaaacaaatttcaatgcattctcattaggcgttgtaagtgtcttgatatgaatagacctctgccatacgggattcaacaccgttcgatgtacgctcttataaaacttgggaccaaaactaaaccttcctaacatcctcgcagtttacaatccgttgtcttgcaacttctcatcctttctctatatatgcacaaaccacttgttaatcatcttagcataagatgagtgctttgtaatactagaggaaattcctttaattcgaaatctcttgaaaattacgttttttcagataatttatggattgaacattttagagaaatgagaaaataaaaggtcccttttacaagaaatgacccactagatatcgtaacagaacaaaatttaatggaaggcagcaaaatatactgagacggtttccgactgtacaagaacaaggtttttctttccaattgtgtgctatttattcttatccagtggtagcttgtgaattgtggaccctactttatatccgaggctgtgtgattcttaaagagacgaaataaaactaattgccgatcttttcttgagagtctaggaaaaaggagagaataaaggcctataattagcttttgatagacaatacgatgaatttcaaattgaattgggtcactttgttttgtacggccctttggttgcattttgcgacggccaataagggtactatcacagagaagcagaatcaaatctgcagtggtatgtattctaaagaggattggagtggtcgtgtagatccatatatttcgttcgatttaaagaaattgaacaaagaaggcatctctgtggtgatctttgatttccaagattacatccacattggggctaagacgaaagcgggtgtagttaagtatatctgtgacgaagaagcgataaaagagaatctatgtcaagaaaagaacaagaaccagtttatcatttcacctgaagcgtatgatccagatagtgataccgaaaagtcattaagtgccgacattcatacgttctatgtgggaaatacaggtcttgtgaaggacaaatatgccattaagaaaactggttactattgtgttggtacttacgctaaggacactgggatctcttacaaggctgaggtaaatttcaggaatagttttggtaatctagctgcttctgaaattaacaaattgccattgtatgggttattggcaatcttttatgttgtcgctatggccttgtacttatttgccttctggaaacacaagcatgaactattgcccttgcaaaaatatttactggctgcatttgtgtttttaaccattgatacaatcttcatttggggttactatgacttgaagaacactaagggttcgaccgctggtaccactgtttacatggtcattgtttcaatcttgaactctgcaaagatcaccatgtctctattcttacttcttgttatttgcaaaggttacggtgtggtttaccctaaattgaacaagaccacgatgagacgtgttcaatttttctccgtacttacgtttgctatatctgtcgctgcccttattcaaaactatatgactccttcagattcgacatccatggtcccattgtttttctttatcccattaggcatctgtttcatgattttctacttcttgattctacaatccctcgatcaaactgtcaaatacttgaagcaacaaaagcaaatcgttaaattgggcatgtacaaaaaattgataattattttttatgtcgccttattcgttatttttggtggtataattctatcctcttttgttttaatcggtatgagtagtatcgagatggtcgaacaacattggagaactagattcttctttgtggatttctggccatccttggtatattatgccgtattcgttgctctttccttcacatggagacctacatctacttcttatatgttagctgtgtcgcaacaattgccaacagatccagaaaatgttgcagatttcgatctagacgatttgcaatctttggaacaagaatggaaccaagagtacgaacaaccagccggatctgaaccaaatgaagcagacctaaatttctcagatgatgaaaacgataagaaaaagccggtgcaaccatcagcctgaaggaattattttcccaaggctattttatccaaatttatcagggaaacaatgtgccaccaaaaataaattacttttctagatgatcgtcagaagttgccactgaactgataatttattcttcataagggcgtttcttctttatgttgaattcatagtataagtgcgtgtgtatagtcaagcagcgtctaattatattcgtaaataaaaaaatgcaatatgtcaacacatcgatacaaaaatctactccgtttattcttttcagttcttaacgtcacttttaaaaatcaaaattatgaaacatttataaatataaactagaatcatgacattcaagataggatatggcaaagttggagccaactgttctaattgcttgagcctttcaaaaaactgtgccatcactgtgtaaattgatcggtggcccagatgtttttgatctaagttctgcggcaatttctcttccagctttccaggttccagcttctatcaactgtgacaattgtaaattagaacctaatttatcgtttactaatggtaacaagatgtccaagagcccaatggtaagacatctccattctacaattacaccatcatcgggcgtgaatgttgggattgacggatcatatccatacttcttcgaattagtcaatccaatgttcaaatattcttctttcaaagatagtacacccaaatcgtagaacaaccccccgtttctgtactctggtagacctgtttgcaagtccttggaagatatattgaacttgtagccaaattcctctagtggtctcaataatgaataacataaccactgcgtcaatttatgaaatgacacgataatttcatcgttttcggttttatacacccagcaatcgcctaaaggttcaccgttcagagttaatcttccagtaggccatatagaggtatatccagtcattagaacctcccacaactgttgcaaatcaatgttttcagagccatttaatttgtaaaggtgatcaattatattaccaggcctggcatcttcaccgaataactcaggtctttcagaaagggatttccctaaacttctgatcaactgaattctaccttcgtaaccttgcaaagagttcttactacttatctgaaaccctttatcaaaatcttgttgactgaagtctttcaatctagaaccttgtactgtctgagatttatcatgcgataaggcaccatctttgaacatatagaaagaggccaccgctagtccttctgatctgttaatcttagtttctttctcaacaaaagaccattctgaacctgcaccagcatcgacaatcacactaaacgttatcaaatcaatcaaccgtctgcatacctccaaaggatcgatgttctgggcagcccaggaattaatgagagatcccattctatcaataccgttacagtttaaatgttgccatcttccatgaacaggaatatcgcctaggttcttgtaatctctttcaataatattgaccaagtaatctgtcactttcgacattttacccagatccacttcaaaatgtgtactgtcaccattttctgtttgcaaaggggggccgtatactttcttacaagtttccctaacggattgaatggatcttaagtactccaagtcttcgcattctgtgtgtgtcatgataaatagccagtatgttggtttttgacagtttcaacgggagataatatacaatgccatcagaattagtttaagcgaagtatcaactgggatagaactatttcattcactaatgagtgtatttatatacttcgtggatggtacacatacattatccttaattcaatcctaagtgtattggaacgttagtttgcacaaaaaaggcattcttatcttttgcaattgacctgtttcgttattctggcaacgattgatccttaatgttcaagaatctccgtcgcacctccgacggatattaccggggactgctcattctttatacacccgtacatatatgccatgggattctacttttttgatataatcatcctctctttcctaaaacagaatactatatgaaaatttcatgatgttctatgatgtcgacaagctagtgctccgaagttgaaattctaagctctccaagatagatgagcattagcatggtattgttaaggttacttacaattagatattaagtctattcatgtcataagaaaccaataaaactaaaaggtatacacgatgtctcaagttgaaaagaaatctgaacaacaacaagaagttgtgatccacaagatcagaattaacttgacctccactaaggtcaagcaattggaaaacgtttctgccaacatcatcaagaatgctgaaactttcaagttggtcaagaagggtccagtcagattacctactaaggtcttgaagatctccaccagaaagacccctaacggtgaaggttctaagacttgggatacttacgaaatgagaatccacaagagatacatcgacttggaagctccagctcacatcgtcaagagaatcacccaaatcaccattgaacctggtgtggatgtcgaagtcatcatcgctgcctaaacgcaccgataatgatgtattgtcaatatcaaattggcattcaatgaataacgggcaggaaactaaagtgttgaccagatttactgcacatcctttgagttttctaccgacataccttgaattcaaatttttttattttacttttattcgatatccaggtctcaagaaagctcttgtatcctcattctctaagattatagtaagactcctataaagtatggtcaattgtgttcaatataggatggaacctttttctgacacttcaaaaaatgacaacccactctaggtagggtagtttatcgtgtacctctattctactatcagtggttaaaaaataatcatatcctctaccaacatctcactcatatttgtttggttactgtctggtttattggttgcttgaatgagtaacttttttgttgtcatgtgttagtgccctccatcctttgtgtataattcgtacatatttttttaatggaatatgattttaatcatgggacttcaaagcaaggcattcaagctgacaactcgaagcagagacttctgcaaatggcctttcttccacatcactttgtaaccctaattcatgtaagaatttcatgaacgccagtttggatgtgtttttttttttcttttcgaattttttttttttgaagttttctttcaaatgtataagaactcgaacacattgatgcaacttgatacttgacaaagatcgattaaaaataccattcagattaaatgcggatcgtttccatactcgaagcattcggtaatcgaatttaaaccactaagatcaagttacttaggtgcttcagcagaagcatcgtgtacttccgctaggaaagacattgaagatagaggagagggcttctccataattagtttaatgatgagaaaatgtccttagtgacaatgctataaacccagctcttcgatcattagaaatgagaagagatacctgtcaaacgctctgataatcactagtaatacaatggaaaacgaaaacaatgcctttactttattctttatacatgtcggatctttacaaagcttatattcttgcagtatgtacgcctttgagtctattatcttgtgttgctatgggtatagcctctattattttttaccactagtagctttgaagtggattatatcaccgtcttcgaccacatattgtttaccgcctcttttgatcttcccttgagacttcaattgcgactcttgaagcggaggatccatttttttgatatcatcgaattttataatgttagcactgataaatgtcttttctaaatcactatggatagttccagcagcttctggtgccaacgttcctttcctaatggtccattgacgagcctcaattggtccacaggtgtaaaaactgatcaattgcaataactctctcattttgatgataatatttgggagtgctgtcagaggtacttccaacttctctttaccgatgatctctttgcaaaaagcctcaaattcttggagattgttgtccaattcgttgtacttcgtttcaagttcagcactaaacagcatcacttcgtctccaggcgcatattcttggatccaatccttgattttcttcaagaatttgttttcttgcaaaagataatctttgggagcaacgttaagtagaaccagggttggtttagctgttagaaagttgtgtttattcaggattttaatctcttcctctgtccagttctgcttgaagtgtgacaattttcttccctcgtacatatgggcctctaattcctctagcaatctcagttcaagatgcatttctaagaattctggagagtttttcggagatctgtttatctttttgttaattctttctcttgcaccttccagccattcgagatctttcagcaccagttcatcttgcactaatgacaagtctctaactggatccacatttccttcaatatgagtaatttcatcattttcaaatcctcgaaccacttggtatattccgtctacgtgccgaatatcattaaggaacttgtttcccaaaccttccccacttgatgctcctcttgttaatccagcaatatcgaaaatggaaagtgtagctggaattttcttctgactctcatagagtttatgaagatggtccaatttaaagctgggtacaataaccttggactcttcgggttctatagtggcaaaagggtagttagctggattacccaatttcgacttggttattgcctggaaaaacgttgatttacctacattggccaatccaacgatgcctgaagctagattatttgaaggtcgtcccagtacggtataaaaccgttttatagattggtgaattagatgcatgtatgttggcacaaggcaataccttgcattgaggtcagttgattgaaatttaagtattatgaactatttcaagatttgattactcaatgtatcttatattgacagaatctgaaaaaaaaaaacaaatgatgggatgagatgtgaaatcgaacttctacaataagacaatacgaaccaactattgatagtaaaactacagatcatgcaacgagttataatgctctccgagcgtatacgaatgtttgtagtatacgatcttgagttcgggattcttcgcgtcttcatttatcctgtaagtggatcttcctgacatcaaaatgctaatggtactgttaaaaacttttgatagtgccaaaatttctacttctccaccccattgggctgtagtttccatagtttttgtatactcatcaagatcctttacggtcattgtattttcatcgaaaagatatgggatgaaatcgtcacggttctccctaatgaatgatgatgaaagcgatctcaacgaatagacgtccatttcagacacgtacttggtacctgtatattcctctggaaagttataatcatactcaatgtcattattagtctgatggcggagcctcagttgatctagaatactattaaacaaacagtgtccatccggctggatatcgaattgtttcaaatttagcactacacaaactttatccaaagagttttgctcaatatctttcaagttcggctgctcggctgcctcttccattgcctgttgtttaattcttgcaacctctgcatccctttttgccaatcgctccttttgtctattcctacgtttctttccctgtaactctggttctcgctgttgcaactcatcggttttacaaacagattgcacaggatcttgatctaaggacaattgagctaataattgagctggtgtgatttcttccgaatcagaatgctcaaaagcaacaccgttcaactttgcgagctctgatttatgtcgagtatcaagttcctgttctaagtctgtacatttggcatttacttgcttcctcgtcttctttgatgcttgcttcttcaaagaagtaatctgattggtcaaatctttacgttccttgcgatgacgcgcaagcagctcctcttgtgcagtttcagtagacattcacttattcttgagagattgcttcagagaggagttcctttatataacaataaaaattgttagtatgctgaagatgagatgagcctattcatctcacttcttcattttcaggtttttttggttttcagtttcgcagaccagaaagagagatgacggcaggattagctacgaataaaaaaaaaatcaaaaaatagcgccgctcggtttcgatccgaggacatcagggttatgagccctgcgcgcttccactgcgccacggcgctgtcaaagatgaagttttagtttttccaacgaccagatcacatctgcgacaactccaggcagctccggaatcattttcttcgtcccgtgcccccgctgttgaaatgacttaccccacataaagtttcaaaaaaaatgaaaaatccgggagcgtgttagggaattaacgacagaccctgaaggaaagtgagtaaacgcttcaaagagcggcttgaacatgttatattccggtctaccccggagaaagatgtttcacgcgctgaacaggagaaggtcattgtatatattcctacttttttctgttgcctctctactttctggtgctatttgtaagagttttttttgtttttcatctttccgccggattggttaatttccccggagattccatttctccggccttgaaactgccgtacaaaccattggctcctttcgaaaatggtggaatccacttcccgaaaatgaccgagctgacaagaaactgcccaactgaagctcgagggattcgaaccgtttaagcttcactgacgtccgactatctactttgacaaaaaaaataaggaccttcttccatactcttatttgacaccaaacacttacgtagttatggttcgctacagttaacacaggaacatacaattatagcagagatcgtaatatttggaaagtagaaaaatgaacttgtcattgttctgcgctggcagttccgattaccttgggtaattgtgccagtttagttctgttcatctttacatgaagcctttctagatgccttcgtatcctgtcttcttctctgtgtatattctgagtatattatcgtaaccgtatgcgacaaaacgtaattgaactggcaactgactgtagatcagtagtgggaaacgcaatgtactgccggtgctctgattaattcccctcagttactctgtgtcgcctaagaaaatgtccttaagctttttcctttctttcataatctcctatatagtccgggaatcatatagagaaacaggaaaaaaaaaacgaagaaacatcgatgcagtcccacataaaagtccaattttgggccaaaaaaaaagtatgaacagtggaaaacagcacaatcattggaattaatacgatcccaattcaggaattaaagaaggatttgctttgtttctgtgaaatcaggtattctccgtgatttggcccttttccaattacttcctgctccttctctcttcgctattggaattgtacaacttttagttcaagtataatttcagttttatacttattatactaattttttttttcttgggtaacgtttccttccaaactaacagatttcattcaaccttcaacactccaggagtactgggactaagtaattaagcattgaggtgggtacaactcttggattattaaactgaggccaaaatcatatattacgcgaaattctatcactaccaccccataatttcatcctattttctgtcaaaataaaggaatacaattatcaggggaaggaacagtaaacatagatttcggaacaagaaacattagagtacgcttcacaaatcccagagaagaaccattttagctgcagcagaaagggtgtcataagagataccaatacgttttactttgttttcaaactatgctaagcgcattaattcaaaatggaatgtcaaagtctggcgatccaacagatgtggaaaacaatactacaaacggatcgtcaagtaccacggacaatgccaatgatgtcggaagaggtgttaacactgaaaataactccaaattggaaaatgacagctcgaatgcagcgacgataactacatcgaaacaggacccatctgctgtagatgaagcaacgactccgaggtcgatcaatacaggagcttctacagtacctgagcctgataatacaagaagagattctgttagcagcaatgtgtcaacggcgacaacagaatcgagaagaagatctaaggtgagcagagcttgtgaccaatgtcgaaagaagaaaattaaatgtgactttattgaggggcacgatataaacccagatcagagctgcactggttgtcgcaaaattggtgaaaaatgcagtttcgaaagaattccgctgaaaagaggaccgtccaaagggtatactagatcaaatagccaaagcagagaaagacgaggctctcagcgacgcagatcttcttctgaagtctctcagaagggcaagaaaccttctgttagtaatcctgtgaatgcagttaacgaatcaaaatcagaagtggatgcttccttacacccaggtcaatctgctacatcgacgacgaacgtatcattacatccattgttacagtacttaccaggaatgaaccattctgcagtgtctgcttcatctccttcagctttgcaacaacctttttggaaagttccttatcacgagtaccagaaccagcgaaggccatcgcttgattcattggctagtgattcttcacaaaaacccggtggtaaaacaaatcaacaacagccacttccgtcgcaatcacaaccacagtcgttacaaaatatcggtaactcaaggtcaaacactgggccattacctacgcaggacactttccgcaaccagaggtactactatcaaccgtcacaagattcggtgtccgaagcaggctcagataacagaagaggatcatctgccatcccaccactccttaacccggccattcagcttcaacagcagcagtattcttactcacaatttgccatagcgcagcagcagcagcagcagcaacaacaacaacaacaacaacaattgcaattacaacaacatctacaacaacaacatcagttacaacaacagcaatcccttcattcgccccaagccaacactatgaatgctagtacaggtatatcgaatggaggatttgtgccatattcagggaataagggacttccttcaggtggtcacgttctagagagaacggatagtgttgctagtgatgcaatgtcgttaaatgcctccccgaatatttacactgcagaggtagaatcggctccagcgtcacctgttcaaaagaagagaaagagatcaaatagatcaagtacatcaaaaaaagggaaatctacccaacagaacctgcctgctactactcctactttgattaactacggtcagatcgctgatgcccaattaattgacacatactatgcatatatccatttgaggttccctattattcctatcaataaagacactttaactaatgatctattactcgtcaatacccaaccaatttccgaattacatgaattaaacaactacatcttactttggttcagaaattcattggaactacttattcgcatctgtttaaaagacaaagaatcagaagaaatattgtatcaacaatcaacgtttgtcagtgctatcaatgaatgtttccagaaaattgtggatattcatccaaggtttagagacttggaaacccaaattgatgagaaaattgctacgatatatcttgttacattcattatcctcaattgtactttggctttagtcagctataacaactctttcgtccttggaatgtcggtaattattttcaatgaattaaagctctggaaaaattttatcttcggcaattggaatactgttactggtcacgataagatctgtttgcgattgtattttgaattgaatacatttgactctttacaatcttgttctttcggtgtgcccaaattaatgaatttgaagcttgacgaaacgactgcatcaaagctattttatgacgaagtatcaaatgatggtaccggccaggaaacggataaatggaacgttgacgaggatccagaaagaattcgaattatagttgataatatggagttaggctatttcctatcaagactatgccaagccagaagatcgtctttcgagaaacctctacctcttgtcggtgaacataacgaaaataaaactataccaggcctattccgtgcattcctttcaattaaaagacaattcactgacactttacttgacttaccagatgctgaggggaagctaccagaaatgacaccagagcttgtcacgagactaagcaatatgatttgtgatttgaccacaaccattcatgacttactaaaactaaatgtcgaggtcaaccccactaattgtttagagttgttccccgacaattctatgcaaacggtagacgaatcttcggcacacaattcagcagcacaatcatcagatccgtcgaatattgaagttgggaccgtatcaccctacgttatcgcaatatacaaagatctatttaacgttgttgaattgattaagaacatgccaacctcgttaattggatgcgttatgggtacacaggctccaaacttcgattcacagccactagtactacaactatctcaatgcatgaacaacatgctacagataacaacctttactagcagtttgagccctttcaagatatttaaacatgaactgaatgctcaatccaaaaacaaaaccatagatgcagtaccattgtggaaacagaaaatgaaaagttctttagcacctctccaaacggcaataacaccacaagaaataatgatggcccagttcatagacattgcatggtgcattgcagacactgaagaactaggatggtttaatcagtaactgaataaaacaaagttaaataaggaaaggtcaccaagctaagtgaagaaaagaaaagaataataacctaaaaatattctaccaaattcattggcaatcacgaaatttacttcttctccgataatactatcatgttacgaaccgaactactcactaccttcctttctcaaattgtaatactaatagcatcaaaaatgctaacacactcctttagagaatagccatcaccttctgttggaatataatccctaaaactaacacacacttccatatatacatgtttctattatccctatatattttccaaaatgtactttaaagtgttccttgattttactcacaacctacagacgctccctgttcttacaaaaggtttctagtgtcacaactcagaataccttccgcatgtgctttgtcctcctggtcggttgtattcccccccacgggcagcagtattgtgtggggttttgcactaacaccgggtaacattctgtggaaccctaaatctgaatcttcgagattttttggttttcgatttagcttttgaggagggaaaagacaagattctttaaataaggtgacaactcagacctattggatttgtgtttaaagtttggggtaagattcgactggtaaaagtgagcaaataactaaaaattaggtcaattttgttcttttgagtgttagctggtagtgattttcttcgagtgggatcacagcgctttgaacaaaaacttttttggttgtgcggtaagtataattgctgtgtgtttgtttgagattagttttaaggaagaatcatgtcaacagtgaagaagcataccaaaactcattccacatacgcgtttgagagcaacacaaacagtgttgctgcatctcaaatgagaaatgcattgaacaaattggttgattcggtaaatgatgatactgtccgtagcaagtttgagaacgaaatggattcgttcttttccctatttaggagatatttggctgaaaagtctagtggtaatactttggattgggataagatcaaatcccctagcgcggatgaagttgtggattataaggtcgttgaatcatctcaggccgaaaacgtgtccaacttggataaattggcagttttgaagttgaacggtggcttaggtacctcaatgggttgcgtgggtcctaaatcagtgatcgaagttagggatggtaacacttttcttgatttgtccgttcgtcaaattgagtatttgaatagacaatacgactcagatgttccgttgctattgatgaactcattcaataccgatgccgacactgaacacttgatcaagaaatactctgcaaacaggatcagaattagatcttttaaccagtcaaagttccctcgtgttctgagggattctttactacctgtgccacaatctttcaacgatgcattagactcctggtacccacctggccatggtgatttgtttgagtccttgcattcttccggggaattggatgctctattggctcaaggaagggagatcttgtttgtttcaaacggtgataacttgggtgctactgttgatctcaagattttaaaccacatgattgaaactggggctgaatacataatggaattaaccgacaagacaagagcagatgtcaagggtggtactttgatctcatacgatggccaagtgcgtttgctagaagttgcccaggttcctaaggaacatgttgacgaattcaagaacatcagaaaattcaagaacttcaacaccaacaatttatggatcaacctaagagctatcaagagattgattgaatcacaagcattatctatggaaatcatccctaatcaaaagacaattactagaaatggtcacgaaataaatgtcttacaactagaaaccgcatgcggtgctgccatcaggcatttcaagggtgcccatggtgttgttgtcccaagatcaaggttccttcctgtaaagacttgttctgatttattaatggtcaaatctgacttgttcttcctagaacacggtgccttaaagatcgatccaacaaggttcggtgcaaatccattaatcaaactaggttctcatttcaaaaaagtgtccgggtttaactgccatattcctcatattccaaagattatcgaactagatcatctaaccattactggtaatgtttatttgggtaaaaacgtcactcttaagggaactgtgatcattgtttgctctgaaggtcaaagaattgatatccctaatggatctgttttggagaacgttgttattactggtaacttacaaatattagagcactgagctttaatgaacgttaacaaacattaatacttggaattacgtcgcatatcaaagaaaaagacacatgccacacttatgatgaactcgtagcctgagcttcaacaatgcaaagtagttgtttcgctgaattatatataacaagtatttaacactcaaccccgacattaataacaaaactcaaaattctattatctgcactaaggaattggtctttgaacctataacaatgcaccatgttcaaatactttgttctaactgttgatagctcaattcataaattcgtccttttctgaagcgtaggctacgagtaataccgttaagtaattttcttcctcgtacaattcatagtcagcacacttattctttctgtagctaaaacatttaaatacatttttttctaatatcaaatgttaagatcgaaaccctttaaataactgacaatagtcgatcctaggggaagacaacaaccgccagagctactgcgctgaccccaacccccaatatgagtacagataacagtaggattatattttttattataatccttctattcttcctttcttcaccgagtggcgatggtgttacatcacagtatgaatttattcagctagagacattaaagtcgcaactcaaatacgagtatgaagtattccgtgaactatcgtacgaccaaaacttcagaaatataacggggctcaagcttgcgtaccatgactcaaaggaaaatcccaacttgaacgctacctatccacttccacacaaggattactcttcttggaaacctaacgagaattatatgatgttacctcaagatattatagacaaagttcaggataatatatggaacagaaaacaaactttatttcctcccaacattaccagtaatttatatggtaaaatcaatctcacagataacaataaatacaccaagattaagatgcctattgccaattttttcgatcctccagaatccttccaggacgaaaagccagcagatggtgaacattatttggcagttgatgaaaggggtgatgctggcaaccatggagaactacacaatgtttcttggagttatgggatagttgatgtcagtatccaacatttggattctgttgagaactcgttgagtttgtcaccagcttccatttcaacgggggaatcacagcttggagaagatgacagccattggaagattttacatttgaacgtcaacttttacaacagagaggagacagagaagcattcgttatctactaaaggtatctatgacatatggactgggagaattttaataatgtctcaaagtgctaagttccattctcttttcgccttcccccattacttggctaacactgagaaagagttcaatcaagtaaaaagattgatcgaaaagtattggaatgcaactaactatgctgaatcattaaccatggccaatctacagcatctttcagatgaggctaacacgaagtgtgaatatttcgggtttttacaactagaaccatgggatcaatttaccccagaccaaatcagaatgatagatgaagaattgaaatggccattgggcagaccaattaatagatccaatttaccgcctatccgattgcataatgctcttctctattcacctgattgtggcttgtctttggaactagaggatgtccatggaccgagatatgaattgcaggttagaacaatcagaattcatttactattaggtgttttgcttttcttagggcagatatatcttttgttatgtcaaatgaatttcaccaatactccaagttcagtcaacaaaatctcatattggtgcttattcatgatgaatctagtggatggatgcttggctatgttatacttccttgcatctccgctacttcaagagctttatttgcccttgtgtatcagcgcatttgcatgctttattttagcgagtgttttcgaaattcggtatatgatctcggtttacgcttctcaagtcaatgaacaaggtgtgggtattttgacgctacttcgggggggttctgaagcaaataccgttgtaaaccgagtcataccagacgaagcatccatcagcagctcgttatatggtagattttttttcactttgattgtctcgatatttattctactttcctcattaatatggcccaaggaaataagaactatatttgaatatagtgtacttgttgtactcaactcttactgggttccacaaatatgcaggaacgctgttaagggaagcgatccacgtcgccgccgccaaaacggataccaatcactccaaaacggtgataccaattgcatccctttgctttggtctttcattatcggaacatctgtacttagacttattccaatagtctacgtgtttacatacccttccaatgttttccgtcatgatatagatgttcgatttgctgttctactttcactttggatgcttttccaacttctcatcctatattcccaagatctccttggatcgagatggttcctaccacagcatgtgatacctgatggataccattatcacagaccagtaccacaatctattttaatggaatatggttcacaaaacaattgctttgtgtgtccaatttgtatggttgatgttcctgtttacgtagaagagactgaagaaacgcataagattgatgcccagagttacatgataacaccatgttcacacatcttccacaccgaatgtttagagaattggatgagttataagcttcagtgtcctgtttgtagagcacctttaccaccactttagaggccattgccattatgtcgtagcatggacagtgtcacgtttgcagccttttctatacgcagtataatttttaaccttaaattatgaaaatgacattatgattcataacttcaaatactcacttatcttgcacaacaacgaagataggaaaaagcagagaacaagcaccaccagtaattgcaatcatgactattaggcatccacaaaggtatgaatgagtatatcctacttatacaataatttaattccttttaaccgggctgatactaactgatcgtattggatctatatttttagcgtcaaagcatgcctgttcgacatggatggcttgttaataaacaccgaagacatgtacactgttgctataaataaggtcttggaggcacatgacaaaggtactatgtcttgggatctgaagttgcagttgcaaggtttgcctggtccagaagctggccgtaaggttattgaatattatgatttacctttgtcattcgaagaatttgatacgttgaataggaaacatcaggcaatcctgtggccaacgagcaaatttctccctggaacattagagcttattgcttacttaaaggaaaggaacgttccaattgcgctctgcacctcttccactgtagaaaagttccatcataaaacttcccaccttactgaagctttcaaagcattcgacgttataattactggtgacgatcccagaattccaaaaggcagaggtaaaccttttccagatatctggcaactggggttgaaggaattaaatgctaaattcaacacagatattgagagtaacgaatgtctagtctttgaagatggtattcctggggtcaatgctggaaagagttttggcgcatacgtcatctgggtccctcataaagatgcgattgcgctagtcaaagaccacaaaatattaggcgatagaggtgaaatgctagaatctttagaacactttgaccgttccaagtttggattatagttaagtaaaagagagtacatatgtcttaactggatttcagacaaaggcatagttaatactcgaagtacttttttgaatagagagattaaataatgtcttcttataagttactacgaacttagttgacttaccgtcatgggatatatgttacatcgacgccttgttattgcttatagtggaggaatgaaaagagtaaacgttcagtgaacgtgagtcaatcggcaaacaggacagccagttggatgagttaatttaacagtgaatcatcagagagggtagttcttgaacaaatatgaaatactttcaccgttgtgcaaacgacgaatagcttctgcaagcactgaagagatatcaattgcatccaattttggacaacgtagcatcttttcttcgaaaggaacagtatttgtgcaaactactctatcaagttttgagtggttaatgttttcaatagctttgccagatagaatgccgtgggtaacgatagcaatgacggacttggctttgttttccaacagaacttctgcagccttagccaaagtaccacatgtatcagccatatcatcaacaatgatacaaatcttgtctgagacgtcaccaacaaggaccattcttgaaacttcattagcgcgagctctttccttatgaatcaaggcaaagttcaaatccaaacggtcggccaaaccagcggcacgtttggcaccaccagcatccggggagataatgatagcttctttgaagttaacattttccttaatatatcttacaactgaaggctcagcatataagttatctactggaacatcaaagaacccttgtatttgagaagcgtgcaagtccatggtgatgacatggtcacaaccagcagtggtcagcatgtcagccatcaacttagcagtaattggagcacgagacttatcctttctatcctgtctagcgtatgggaaatttggaataatagctgtaattcttctagcagacgcggtctttgatgcattaatcattattaatagctcaaggacacgatcattcacatcaccagatccgatctgtgtaacaatgaagatatcttggtctctaacagattcaccaatggaaaaagatacttcgccgctgggatccctcttcaacttacaatttgtaagcttcaaacctaacctcttagcaactaactcggctaggttacgatgcacatcgggagccaaaagcttgatagaattggttgccattttcttatcagtattgaaaagtgtttaaatgatgtgtttgttataacagtttgcttatttttcttcacaaaactgaagtacgagggggtatgtgaatcgaatcaggagcacaaacgaagcagattacctagttcaagccaaaaccaaacctgcctatttcctcccaacttcaaacatcttcatcttaagtcttttcatcaaaaaacctttctttggcatccggaacttcttttagatgaggaaaaaattttcctttctttttcatgattggaagagaaagactctttggttggctaaggaagactcagtttcattgtggaaatattgccggtataaatggcgtaggaagtcgagattttgacatgcaagaatcaattattgaactttaaatattctatctagaaagctgcacatacaaggcctaattgtagtaatttgcttatcatattttgggtattttcggaatcttcttcttctttttcttcttgttcttagcactggaagatgcttcggaacctggaggaggttgaagcactaacgttgcattttgaagctctgaatcctctgcaaacttttcctgggattcaaaatggaacatcaagtcttgaatttgtgactgcaattcttgattttcatcctgtagtttctgtttctctaggctaaatttttccatctgtttagttaaatgatctaagttttgttgaagtccggagttgagcagcatttcttccttaagccgatttttcatttcttgcatactttcttcaacgagtttctttaactgtttgtgatcatctttttgtctactgacttgcatatcagactcgagcgatttcactctttcatgcatattgtaaatttgtccctcgtaatactcacgctgagattctaactgagacaaaagtacttgaacgtattccaaatgatactctttattccttttcgtattactcccgtcatgagattcacccacctccaccaactttccgtcgatctcattttgaacaatccgatggacgtaattatcccccgcataatcccatacccgttttgttgtcaaatccattgcaaaacaatggttcgattgttcgtaatggcatattgcatgttgagaattataacgaccacatccaagatgtccacaaattagacagatccaaagattgttcgtttcaccgcattctagacaacgcggcagtggttcattattaacatcttttaactgtgagtatctgcagacagggcaattaccgtttttccattgatctaggcacttacaatggaacgtatgttgacaaggggttgtgactaatccagtaacttcgctgtctaatttttctaggcaaacaggacacataggtagttctattaaaccatcagattgttctgaactactctgagtaaacggatattttaacatgtaggggagagcatctttatcttcactaaacattccttgatgaaatataagctccttaattgctaccacatgacatgtttctggatcaatttcattgaacttcttcccatcgaagagcttctgaaactctttcgccaagctttgttccttaaatttcatcaaaagcataaaccgtcctttttccttgttcatttttattaattgtaaatgcgtcacttgattggttgtttcttctccaataaaccatcccaatagtctgtttatggtcaagtagtttggaataaatagtatggctagcatccttccatcacctaattcccggtagagttctttatcatcaaaggtaccaactgatgcgtggccattcttgaaaagccgtataataccatggccacaccattcggattcgatggaaactttgttactacaagaatgtaaacttagcattggaatatggttccaactctgttcaatacgagaatcagtcttccgctcaaaagtcaatttgccagacttaaaaaacttataacaatcgtctagactttctgttacctcgataagtaatgtatattccatatggattattcttagacccgacaggtaactagtaggcaaaatgtaaagttttctggttgtacgaaggttcgcctcttggcgtcatattagctgttgccagtagtcatctcatccctaggaatatcaacaatcgggatgagaacctgccaaaggaagaatggaaaaaaaaacgatcacgtgattttaatgatatacttaagccttctcaatgaaatgcatcttttacgcgatgatctgccttattctcgaaatatatgttaaacataacgagttaccgtcacagctttttgacatagcataaaaatatatcatcagaagccgcttgagatactactatgtttacacaaggtcagcatgttcggtcagaacatgcaggaactaaagatgaagcctttggaaagataaaaccaatctgtgtgagactctcccaagttaccttcaggaaagatgagctactcatattacaggatccgcagttaaaacagttactacaagatttgattcaaaacttagatatccttataactaagcacaaatcgctttcagggaggtttggagactatgtgtttgtgcctatctctgcaatgttgaaaacgtgtaaatcacttccggacccaattgcaacattagtattcgaaattttggcgagaataatagacgtttcgtggagtttaccggcgacagtggatcggaacacattctcgcagcttctttccctatcaacctttctaatatctaccgatctagaaaatgtcaaccttcccaataaaccagacgaattcaagattgcttccatcagacttttaagagttttgtattccacagcagctttcaaggaatgggatgcaaatatgctcccagcaattgcacactcaatcaccattttgttaacattattagaaaatagcaatatgtcaatccagttagagagctcaaaaacactaagattactgtacagagtaataaatgacggagaaatgttaagtaatgtggttcccggaaatgtctctacatttgctaagattctctctcgtccagggttgactactcatgtgaaagtggcaagtgatgtattatcgactatgtcagaactattgtgtatggtatatggtgactcttctttggaaactttcatcaaaacgtctacaggaaatactgctgttgaagtaaaaaatccaggaaagcacagaactaccaaatggttaaatgccacatcaattcaattgaaacgcgcacttgaacccaccttttcaaagctcactaaaaggaataatgaaaaactgaatggtgaactatttgaagcttgtgttctactacttaataaatgccataattcactttatgggtgcagagaagttatactaaagacggctcttacagtagcaagggataacgtctttgcattagaaagattcaagaacgatattgcagcattcatgagagataacaatattcaggtcgaaacaaacttcgaagaaatcaaccaatataatattgtgaataatgcattaagaattttggatacagatcagcttgaggaatatcaaatatcaaaaactgttgcttatggaatatatgactctttgaaaacccatttgttgagtttagacaaaacagagaacattaatttaattaaggttaccagttcagaggtaaactacttggtaacatcgggatctcttaataattctgaagtttccataattccgaaaatatcatctacagcgtacgaaaatgttacaaatattttactgcaactaggatccaagatgagcgcctcttcaatacaagaacaaatcattgagtttctttcaatagaatcagatgtcttaaaaaactcaaacgaagctctttggatagcttcaactttattaacagggtataaaaacactgacataagtgattttcttgcgcatgattcagacccaatctcctgccaatatgacattatagaaatggcaaatgagcgggtatcaattttatcgaatcaaacggaactaaacgagttgcagcgcaccaatttgactatgaatttgtttgctatgaaacaaatgattattctaatgggtaaagatttcaaagatgaaatgttagattacatctataatgtcattgaatgtttcgcaagcgatgatgagaacacaagattcatttcgggaaatattcttcaatatttggccaatgaattctaccagggtgcaatgctaaatttgtttcaagataatgttaattacataattgacggaatctcagttagacttgacaattgtctattccatcgtgcatatatggttcttcgtgtagtgataaaggtttctggatacgatcttgtggaacgtttgaatgatatcctagagaagctattttggatgttaggatattatcatggatacgatgacctctgcactgtactattgaacttattcatagagatttcatacaagatacaatacactttcttgagcaaatcgagcggacaatctatcgagatcaaaacctggaaccaggattccttcaagccatggggtatgtctaatatcgaacaagtattaaatgtattggatcaggagaaaactgctgcagatgattatggtagcattgctgaggtagaaccacctgaacagacggccgaggagtttttcaaggaaaggtttgaaaaggatagcgatgacgaagatgaagacgaagaagatgctgtatcggagaacaattcctcggtgaataatggggaggcgaaagatgagatgaaatgggagtccccaatatcaagggatgcctatatgttacttttaaggttttggacgtacgcagacaggctcttaacacattcatcgcgttccgtgagaaataaatgcttagatctacttctcttactatgtcccatgctctctacacagcaggcggtctttttaccaaacgttgccaaagtctgggatatcgttgtacggtcagccatctccgaggatctcgcacaagttggtagaagttacgaacttttaaactctttggttttacacactgattccttcctcatgaaaagggtactagatatgtggaaactcttttctgcaagggacaccatggtatccaaaatgctttctccaatttccaaatctactagagtccacacaacgaacactttgcaactacaagcataccttcgttgcagcaaattgcttataacgtgtatgaaccaattcgggctacaattaccggaccatataaccatagagatgtgcaagtgtttacaatcattacccaaagacaacaacagttgcagccccactcaaattgaatcgaagcacgtgaccaacattcttctcttactaaatctaagatcacaatgagcggtaagcccgttagaaataaattacccggatttgtactgtcatttggacctttatttttgacacacgaagaggcaggaagaaaacaggacaaaccggactgcggaaaataccgaaaaaggaaacagccggctttgtattgatttttaatttcttctctcatctccgcagctttttctgcctggacggccatgattataaactcactcggcaaggaaggtttctcaccgtgctcctcattcaccccaccatgaactgagggacacacgcatcaactgagtctgttatgagactgtagttcggttccatttattatcggaatctgatagcttcgagctgctttaaaagatatacgtttatatatatacatatatgatctatctttttatgatcgttcatctggcaaggaaataggtggagtacggataggaacaattcaagaattgatgaattaaacttgagagtaaaatactttgaactaagctagtgttaatctcaatatagttgatatacgctaccatcgtcgaggcacctcagcattgcatttaccgagtcatttatcattgctattcagtttttcatattccaattctgtctactttcccttgaatttgtgtctcatttagacttttctcccaaatttcatctcatcgcttagtgttaccattacattatcggacaggtttttgttctttccacaataatataagaacattttccaatattaaggtcaatataagtagtgcagcttagaggttttatactgaggtaggtcttgcgcgctcgaaaggcattattttttctgaccataaccgtaagaggcagcttgtgtactcaaatcctatattgtcactgttgaagtgcacatttaacgaccatggttgatgattcgtactatatcactccgcatgagacagctctcgctgttgttgcgacttctatgaagaaggcaagactccgatttgatactttggtgataaactcattgatgggtggaatactcttcagtgcaggtggcatgcttttcgtcgcagcgcgatccgagaatccgttaattttcgaacaacatccaggaatgacaaacttcttaggagccttcactttctctattggtctcttttacgttatcatcaacggtgctgatcttttcaactctaacgtcttgttctttactgtgggttttctacgtggagctgtatccatatatgatcttttcgttagttgggcaataagttggttggggaacattgccgggactttatttgtatgctacgtcatctgccatctatctggcactactacctccgaactacttgtcgccggatcaatatccattgcagaaggcaaagctagctcaagtttcattcaaacattcattaagggtatcgctggtaatttttacgtttgcttggccgtttatttacaacttatgtgcaaaccaatccatgttaaactaattgtcatgaccataccaacattcacttttgtcgctttgggattcactcatgtggttgcagatatgtcgatgctcatgattggtatgcttaacggtgcaaatgtgtcagtcggtacttatatttggaaattactcatcccagcaaccttaggaaacattataggtgggtccttctttagtggagtgattccatattacctacacttacgtgttgtggaacgcgataggaaacaactatccttacctgaatttgaggctagagatgagcaacctgagttgaatatggactcaagagtcgttagggtggatcctaaggagacagcagaggctgaagatgactcagatatagattcagatgatgaaaactacggcttactgtccgagaaacaatcttcagatagtacaggacgtaacgcctctgatgatcaggtactcccatacgttggtactgatggtacttccagagatcttcatagaagtgagactaatggtacaatggcatcacttcggtcacatggctctaaaatacgttctccacctggtgttttcccagtaagaggaatgggtaaaccattggcaaaagaaagaagtatagttgattcagaatactccaacgaatcgcatcactcttcaaaggcttcaccgtctgtaaattcttttgatatgatatccatgcgtagtgatgaggattctactttggaaaatcctatcggattccaaggtgtatcgcaacaaccgtctttacaagaacggagaaattctattctacgtacgttatctcgtattcctactgttcactctaatcccttgcaccatatgagttctcaagatgaccaagagtataagaaagaagtggaagaatatgaaaaggaaggtcattacaatgtaagagaccataagctaggtactaaactagaaaaagcactaacaagaatcgccacccggaaatccaatgaagagctatcggatatgctcccaagaacgacgcaagatattttcccggaacaaaaacctgccgatgaaatgaatccaataaactcaagaaggagtgggactaccatgtccggattactcaaaacgatcagtaaacagttcgttccaacaaagcagccagccgatgtaaatgaggttcacagaagactcagtcaagctggcatcaccaccaaggctgccaatgcatcagacaatattgcggggatcgaaaattatgatggaattgaactaccctcacattctccctactacagaagaccctctaatataagcaatgattcgacttcaaattcactctatactatgggctctgttaacagaagcaagacgccgtcctttatagttgatatgggtcatgcatccaacccaatcggcggaggaggtgtatctgttgcaggaaaaagaaaatcataccctctgaaaaccatacctcattttgataatgacaattttgaggaacaaagtgtgacagacttgcattagacgctatgaagaaaggaaagctttctctccaaaatgcgcacgtaatgtcagactagcatatttatttactttcaatgacagactttacaacattctttcccagctcttcgatattcataaaaacaaatacaaggacaagcaaccgcaccgctgtttttctaaacgaacagcatcaccatcagcataatatgtcattaagttaactgtttgaatcgtaaataaccgcatatatatgtatatatatgtcattctaacgacctgataatgattgattttactataactgtgcattcctttaatgttacccggggtacgcgtgatctccatgtttttaagatagaagaattatagaacatgaaatacgttaacgcgttgaaatgactttgaaacaagatacaacattaacagcagggcgtgacgagataatattacattcccgttgatatggatagatcgaacagaactgatttacatttctctctttactgaacactataaaggatgcagtcgttagaattcaataaatcaatcataccaagtctggaggactcattctcttctgccgtgcaaatcgaaagactaggtgagcttcatgaggagttggcaggattagaacaagggaaagtagaattgaacagtcttgagaaatacaagaatgcactaattaataagaagttgctgagacataaagattctgggattagagcattaactgcttgttgtcttagtgatatcatgagacttaacgcaccagatgccccttttactgaaacagagctttgcgacatcttcagattgtttctatcacaatttaggctgcttagagatcctgataacggaaattttatacagcaaacctacttgattactaggctcctcgaatgtagatcaattgtcttaattacagatcttcctccttctaaaaggctagtggaggagctctttgaagtattctatgaaaaagttgaaagtcagttcccctctaaactatggaaaattataggcggtttgctaacagaagtcgtttctgaatgtgataccttatcaatggacgttttaaggctaatcttcaatgcatttttaacacatgagtcaagagcaaataacactttaaaaggtttagtggtggacaaagatccatccttcgaattttctttgataatatgtgaatctgctacaaatagacttggaagacatttttcaaaattttactctgagattctgtatggaattaccaatgagaacgaagggattcactctgttcttgattcctcttaccgaactttaacgaaactccacaaattgacttcttacatttggcagtatacaccagagttagtacattcagtaatcggatttgtgtatcaggaactttgctctgataacgtgccattgagattagctgcaactcagttgataactgacattctttcgtttcactccactctaaattttgtcaccacccatgcagacacttttcaaatttggctatccaagatggcagatataagcccaaaagtacgtgtacaatgggcgaagtgtgttccgaaaatcatagaaactcgatccgacatctgtgaagagatcgctaagggaatatcgaaaactttcattgatactgacgaaacagttcgtttacaatctataagatctttagcggcactttcagcgaaattagtgtgggccagattacaagttgacacaattttcaaagaacttcttcatttaattagagacaaatcgaaagaagtaagggcggaatgtatttcctacgtatgccatttttacgatgaaaccttaaaagaaaatctttacgggaaacatcaacaggaaagaaatgctaaacaactctgggacgttgttaatgagatccctactagcatttttaatttgtactatatcaatgatctgaatatcaatatgcaagtggatttggtaatcttcaacaaagttttgaatttggaccttgaagaagatgctaaatacaacagattgatacaagtggtgtcttctttaagtttgaaggctctttcatcttttttcgcctttaacaaacgtcaagtacaaatcaataaggcaatgaattcactttttgaattgaagaatgaaaaactcgataaacttatcgaatggttagctgctactgttccgaagcagctcgaaccagtggcaatcactcagaagttccttgaactaaatgattcaaggataaatcatctaatcaaagtatcaattaatcaggagacggactgtattacactcaaaaactctttgcatgaattaaagataaaattagaagatccggaactatttcgaaagaagggcgtacgttttggcactatcttcagcagagagtctttcaacaaagtgattttgcttctcgtctatagggccgcaccattaatatacaatgtatcgtgtatcccctaccttcttaacaattataagagggaccaaaacagcacccttaataacgttatgactcagttgattcaaaatatatctgagatcaatccctttttattcaaaagccaaacagcatcattaagctccttggttatacaagacaaggatcgatcaaatattggaaagcatgaacaattgaaaactttatacaaaattttcaaagcttttcctagtgaagtaaatcttgaggatggatacctgctagagaaattacagaattttgcaacatcaggcaatatcgctgaaagcaagtatgctgttaaaataatagcactaattcctgatagcgaaaaaagacggaaactgttatcattcttacggagttcagcgttgccactagaattttcaagcgaatcacctcacttactctgcaataatttatgtattctatctcagctgttcaaagttgatttcgatctactcaagattgattgcaatgagataactacatttatcctcaaggatgtgctagtaactaatgagttcttcaataatctcgttgaagaagaaaaatcatcggactggattactgatgatgatctattgaatgaacaacactggcctatcacagccaaaattttatgtttggaagtattaacaaacagaatgttatcggaagcaagatcagttgataccgacagttcgcttgagacagtctttcataaaatattaaaactctttttgtatttcgtctccaatggcggagaagttatcaatgaagagaatgaaaagaggttcccaactccgttcgcgtatcagcgtagaattcggtgccatgcaggtttacagattctgaaactagccaaaattgctaaattcaacaaatggattgaatcaaaatatatattcaaacttattaatttagttgaagatgaaagcttccctgttagacgcgaattcgtgaccaagctgaaaaactatatttcaaacgaagaaataagcatcaaattcattccattagtgttctttatgccgtttgagccagatgccaaatttaaaactgatactaaaatatggattaattttacttttcaaaaggaaacagcacgaagaggagctatatttgaaagaagccttccaagacttctccactgcattgcgcaccatcctgatatcgaagaaaacctttatgtggatgcttcagaagacgaattcattacatcttgcagcactgcaattgattatgttcttttctttttagatactgttttaaagcccgaaagtatcagcttattgtattacctagccggtcgtataaaacagtacaaagacttgttagatgaggctccaacatgcatttacgtgataagtgaattggttcagatgattttgaatgaattgaaacaaataaaaaatttgaatctcaccgtgtaccctggtaaactcaacctaccgagtgatctttacgtacccttcgagaacatggaattagcacaggcaaatacattcaaaacattcatcaaagatgattacactcaagttcttgagcaaaagataaagctaaaatgtagtaaaatggtgcatgggtcatcgacgacaactaagcagcaaaaacagcagagaaagttgacaagtgagtataaacagcgcaccccttcaaagaaaagaagacattatagcagtgacagcggcgatgactcagatggtgcacatgatagaagtatttaccccagcccactgaaaagtaatagaggtccccaaaggaaaagcacccgtactaaaactgccgtcgattataatgaagatgatgagaacgaagaggtaatgtaagttacgaaattccatcattacctagctatatatctgtcataatttatctaaggaaatgttttttatcatatgtagttgtttctatatataagtcttcaactcgccgatgaagatgaaacataaaataacaaacagctccattgaatacgggcatgcgtgaacctttaactattgagtaagtttgaaaaattcaagaacttcttttttcggtttcgactctaaaagcgttttcaacttttgaagaatcgttaactcggactcatctatgggttgaatttttgccttttccttcagcaattgttgttccgatattttacagagttccttaaagtcccataatcttttgagggtaccggacgtttggaagtataagaggttggatatatcattcaatatcggggtttgattttctgctgcaactaatttgtctaaaatcgtagaatgctgacacaagtcttcaaactgctgtacacgtttcgcctgataaaccttatctaaaaactctagtgcgacattctgttctgtaagttttgataaagtccaggagtccgcatctattgctatttctgtatctccgttgtttctacttcctattggaagtactatatatttctgttttccccttgctaaacgtcttttgtatgattttggtaatggggcatgcaacgggcatttccacttcgatcccaggtttttcaaggatgctctaggcagtggaagacaatctaagtgccatggtgttgaacagtaatcgcaagtcattatcagtcgttgggagtccggatggtcccatgttcccatctttgattctccacaattatagcacactaaaagttctccagaatcctggttgaaatgatactctggctgataagaatccatccgtgtgacagactgcccgtacgcggaatgaaaaatttgtttttcattgatattttctttaaagtgttcgtcacgatattctccttgcgaccccgaggagaccgaatcgaacgttgatttgataatagacggcaattgaaattggaacggatttttcctttgaagatcaaatgttagagtaccgaataactgatacccgggttgcttgaaatggtcttgtaaaaaccttgttttcaactttttttcagaggacagtccgtatttattagacttgatccattgcttgaatcggcattcatcacaagaccaatcaccttctggtagatggcttggatccaaaggtgggttacagcaagcaaaatggaaagattttggacaagtgtcacagcataagaacaccccaggaccatgacagttggaacaaaaatcgtcattttccttgttattatccggatcaatttctggaatatgtaaatgagaagctttatcattttgtccaaataacttggtatctttatccttggtagatttcaaccttttcgccatttttagtgctatcgatttactgggcgaatttcgtataggatcctgtagcataaaatccgagtcagcctcttgtttaattcctgaatttttgttgtgtttagtgggagtgttcgctcctatgcgttcatgactttgtacggtcaattcatttgatttttcagtttgtagttgtccctcatatttagcctccatgctgctctttaatgcctgtaatatattggatttcttcttcttattgttaccatttctgtgtttaccacttctattattgctatcatcattgtcgttattattgatgttattggtactattattattgttactgttgttgttactcgatcccttcggcttctgagataatggcgtccctgtcatagcatttattggatcatgcactggcggctcctgaaacgttatatttccattactatccttaagaatgactggtccaataggttctgtcgatggttcttgggacggtgatgaagatattgaggatgtacttttcgttggataatcatcacttggaataatccgtctctttttcagattataatccacattggcagtacctgaccgtttgggcctcgttacctccatattttttgtcatgaagccggaaagtagatgtactggcacgtaatttttttagccggtactttcccctactcgttgtttcgcgttgaaccataatttaattcaattgttagatgcgttcaattaaatttgtatcgcacttttttattttttttctgtattccaatatcacgaaccttcgatagttgaagtcgtatacacataccagctatatcaatgataatggaatcaaaatgtatatagttacgggaacaggctgaggcgtcaccagtcacattaaaataatagaagcaaccatggacgacgaattgagagccattagagaggccagattgagggaattgaagcaacaaagtggaggaacatcagaatcagcaaacaacggatcgaatgatggtcaaacacaagcgatattgaatcagattttggattccaatgcacaagaaagattgagcagggtagcgttggtgcggccagaacgtgtaaaggcagtagaagcttatttactacaaatggtgcggtccggtgctattagaaacaaattaacagagcaggacatcgttggaatcctcgaatcagtcggaagagatgagcaaaagcgcaatactacacgtattatattcgatagaagagaaaaaggaacagcatcatctagtgtggatcaagatgacgatgaagacgatgatttctttgactagttatctgtcttcaatatatcaggttttaacagagaaagaaagtaagatatacatgcatatataattacaacgaatgagaactcaatcctcataagtaccaaataattgcaagaatcggtagttccaaaggttcaatgactactataggtcaatgctccctctgtcaaatcaatacatgtccaaatcacgtgcatgtgaccgggtaacgtatatttcctcatatttctgaaaattttcagtatagcaactattcgtcaggaattgcagttcactaaaatttaactaatagcagttaaatgcgttgacaactagactgttgtttgatctgtaaatatttattgacgtagtttatcgtagtgattagtcttctattcatagccacaggaataccactcctacaataacaacatataaaaatcatcttctaagaaatgttcggtctaggcggtcaacctcaattatcttctcaacaaaagctatcagcagctgaagctgaactagatttggttactgacatgttcaacaagttggtcgacaactgtcacaagaaatgtattgaacaaatttataacgatggtcaactaaacaagaacgaatctacttgtatcgacagatgtgttgccaagtactttgaaactaacgttaaggttggtgaaaacatgcaacagctaggccaagctttctctccaggtaaattctaaacccgatgagggaagcttaagccgggacgttagtgcataatctttttcgcaacttttcacgttttatcatgtacatatatgacaaattttgtatatacaaatatattatatatatatattaattatctatttacagagttttaaaaatgaggtaatgtcggagtaccaaacgattaggtttgtgtatctcgatcaaaccgataaatatagagatataaatgtatttgctaataccgtgatgtgtttttgtccattatcttcccttaggattgaaaatttggacgatcccttctgtctttaaaatcctagcattttcataacgcgtaatttacaaccttcaaaagtattcacttttggtctaacgtccaaatatattggaggaaggtggttcttttcaggttctggattcgaatagaagtcgatgacataatctatttgtttcccgcagcgatcgacgacccaatcgtgcctatcaaaaggtttggtcattccaaggattgaggatctaaaccatgctcttggggttaacttctttgaatcgcctttgaaactagtcaatttgatgccaccacagacatctcccccttgtccgtcttcccaaattttgatataattccatactctttcattaacggaattgtggatgggaacaacggctttcatatccacagcttcgggatcccaattttttctcttcattgcctcgaagaattgcttctctgatggataaacccaattatccgatgttccggttctaggaatggaggatttctctctctctgttggcaaattaacagctgtggtatatttcgggtgttcaggtatctcatcacttgaacattcgacatcctcagtgatgatcgatatgattggtgctggtgctgctgcaactgcagcaccgccagcagagccattaacggtctgtagatggtttttcagccatacatcctgggaagaatggtctaccggacaaactcctgacccttcagaactagccggtggatgatttggaggtagtgcttttgctgattcattcttattattagtgctctgttgtttcaaccacacttccttcgtggagtcatccacaggacacttaggctgttctggcattcttttgcactccacagttagcttctaaacagtcgcgaatcccctttaagccgccaacgatgttgcttctatatttcgaactattgcgttcaagcctatcctgatgaaatgcgcatgaataagctttcctgtattcgcatgttctgcatacttttccatttcattcatttcttttcaattgatatcaaattgatgaagtttcagaatgaaattgatatccacgggagatgacatttcattacccgaatgtgcgacaaacatccttgtttctcacgtgacttgacctccagatggagacagctctccgttgtacatagcaatcgatcttgcagccaccgttaacatattgtggtgcagtaattacctgcagagcgacttcaacctaaatctgaaacagggacgttgctaggaatgttttttaaaaggaagcaaacccttaaacagtgtcaagtgcttgtttgttttttacttgcttgttttattttccaattgagcttgattttagttgtcgtctctgtgagatttctagggtatctgagttgaggttcttgactcaaagcttcatcatgttttgaggttcctatgataaaggctatgcaatgctaaatcaggaatgtaaagtaaatattgctacgttaccttttaatattaacatatatatagacggattggccacatcgtgccaactacggcgaaaacgtgaactataaaggaaaatgaaacaaatgaaagaaactgacgctggccggcaagaaattaagcattatgggttgcgtcgcaagtacaggaaactatgagaacgaggatgatcccttcattcaaaataaaagggcaaatgatctcattgagcaaaatttacagcaggaaaggaataagaataagaatgaggtgaagctccttctattaggagcaggagaaagcggtaaatcaacagtgttgaaacaaatgaaactcctacaccaaggcggatttacccatagagaacgaatgcaatatggacaagtcatctgggcagatgcaattgagtcgatgagaacgctaatcttacaagcaggcaagttgggcatcgaattggatagtgatttgaaaaatgcacattcggggcaattggtgaatacggaattacaccaatgcaaagagaagatcttccgtgctaacacattggaccagattgatgccagaatggcgggtggttcagagttcctaaacgagtatgtgttgaaatataatggcataggatctaagaagaagaggcaaaccacgcttggattcaaggaatcaaatggtgctgatcctgaagaagaggatgagacagacgctttcttgagtgaaaaattagccgggacaagttatactggttcctcggagacttcagagttgaaacgtatagaccaaagtaccaacgaagaaattgcctatgcaatcaaaaagctttggacgcaggacaaggggatcagacaatgtttcaataggtcaagtgaatttcaattggaaggatctgcatcgtattattttgataacattgaaaaattcgctcgagttgattatgtttgtgatgacatggacattttgaaaggaagaattaagaccactgggatcaccgaaaacagtttcaagattggaccaagcacgttcaaagtttacgatgctgggggacaacgaagcgagagaagaaaatggatccattgtttcgaaggtattactgctgtggtatttgtaatagcaattagtgaatatgatcaaatgttattcgaagatgaaagggtgaaccgtatgcacgaatcgatagtattattagatacactattgaattctagatggtttgccaacacacctttcatactattcttaaacaaagtagatattttccaagaaaaggtgaagagatctccaatcagaacatggttccccaattatccagggaaactgggtgatagcgagactggactgaaatatttcgaatcattattcttaagcttgaacagaagtaacaagcccatctacgtacatcgaacttgtgcaaccgatacacaatcaatgagattcgttctaggtgccgtgacagatttagtaattcaacaaaacctaaaaaagagcggcatcttataaatcctttaggtgtaatatgtcaggtaacgcgcacacattacatataagttgtacatagttaagcgatgaataaggttctagatcttttagagggtaacctcaaatatttgtcagaccccatcacaaaggccaggttaaaagtgaaaaggcaaaaaaacagggtgtttccgggtaacgaaagatagcaagcaagtctactatttaagaacttcaacaagacacataagtacccttgcttgacgaagttctactgtactgacaatatatagatacttgcaggatataaccgttaatcaagagccataaaaaaacatacacacccaacataccattacagagaatgtctatgcagacgagtttgtgcaaggaaaagaacatcccattgagccagatcatacggcccattcagccggtcctagaccatgcaaagatcgatgcgatgatatctactttcaagggaacaccgaaggcgtctcgaacaatgaccgagtcacaagctgcagaacgtgttgccacattacccgccgatcagcgtctacctccagtggacgtcgctgccgtccgttacccggaaacaggagaaacaaggtactttgcattcggcggctgccatcgtctccaggcgtacgacaaattagcctcggaatcccaggaaaacgatatcgcggtccgttgtcggttgatgcccatgacaccaaaacaattgaaactatacgttggaggatctggagacgcatagtaaatcaaataagagagaattttcagattattccgttctattacccggtggacctgataacaccggttaatgcgtgtcatctggtttcctatgtaacgtatacatgtatgtaccccgggtaacatttctccatacaaaaaattacttcatcacagtgtcggctccgcgccacgttaacaagggaaacatatttctttggtcttcctgaacaagcgtggaacaataattacagctgagatacctccgcaccaaagcaagacaacatggctcaaatacaaaaaaaatgtttgcacaaaatggaaaattacctcggtcaagaatgatttgaacagaaaatttaggattcgatctggttttttgttttggttgaaaaaaatgtcggtcacgccttttagcaaagggaaaagacgtcaatagaagaagctatagaagggagagaaaccaaaaaaaaaaaaaaaaactctggaaaaccagaaaacttcacagtagttttgagagtactgcgttaataaagtatcaaaaataaacgggtaaatatcatgactttgaccgtgataaggaaaaaaaaaaaaagtgcggttgttgttttctgcatggttgaaatgacattaattgcccaaagtaaatgacatgacaatgaaatgtcatgtaatttgtttcgcatatatgttacattttgtatcaatttcttcaatcttgtattattatatataagagagaggtatgtgttgaataagaaggaagttttcttcgtttaagtgtctgactatttcgaatacccctttacatagttggcggtttgcttagtaagaggatcttaaacttttttcttagtctttgttttttattacagaatagtcaagtgctttcaattagtaacccagctccataatacccacacacatatcaccatgcttagaagcatcgctcgtcgtcaattttcatccaccgcattcaatccatacaaagttaccgttttaggtgctggtggtggtattggtcaacctttgtctttactattgaagttgaaccacaaggtcactgatttgagactatatgatttgaagggcgctaagggtgttgccgctgatttgtcccacattccaaccaattctaccgtgactggtttcactccagaatctaaggaatcccaagctgaactagcagctgctttgaaggataccgaagttgtcttgattccagcaggtgttccaagaaagccaggtatgacacgtgacgacttgttctctatcaatgctggtattgttcgtgatttggctggtgccattgccaagaatgctccaaacgctgccatcttggtcatctctaacccagttaactctacagttccaattgttgccgaagtgttgaaacaaaacggtgtttacaacccaaagaagttgttcggtgtcaccacattggatgtgatccgttcctccagatttatttctgagataaggaacaccgatccaaccaccgaacgtgtcaccgttgtcggtggtcactctggtattaccattctaccattgatctctcaaactaaacacaagtcgatgattcaaggtgaaactttggacaaattggtccacagaatccaattcggtggtgatgaagttgtccaagccaagaacggtgccggttctgctactctatctatggctgaagctggtgctcgtttcgccaacagcgtgttggctggtttcgaaggtgaaagagacgttgtcgaatccactttcgtggactctcctctatacaagagcgaaggtatcgaattctttgcttccccagtgactttgggtccagaaggtgttgaaaagattcacggaattggcgctttgtctgaaaaggaagaagaaatgttggccaaatgtaaggaaactttgaagaagaacattgaaaagggtcaaaaattcgtcaccggtaactaataaaatgaaagagacatcaaaagaggtctctctggatcatatatatatattccgcaagacgggatcatcttcatgcacttaaaataacttaaaatcatctataaattaacgattcatttatatatttatgtatattctttccacactactttttttttcccacatagtttaaattcgaaaacattcaaattgaaagctgttaaccatcccatactcaatatcgaggatttgagagtatattactttcatatttaagaattgtatactgcagtataactggtcacccatctccatggaaaaagcacagatatatgggaaacttgtggataaagaaagtcggtgtgaacactggcacggtccactggacgttatagccctccggttcaaatgctgtaacggatactatgcatgttacgagtgtcaccaggaattggtaccgcacgtcacagaaaggtacaatataaacgacgaaactgtcccgttggtcatatgcggcgtatgcaaacttgaaatgtcgtttgctgcatacagtgattcgttgcaatgtccgaattgcagatcgcaattcaacccaggctgtaaattacattacgatatgtattttatgaaagatgatgaaccagaaaatctccgatagataaatatatactgttctatcgcgctgcagtgctatcttcacctcttctcactttggttattgccacattgagtaacctacttgtcgatgggatgctgggtgactccgggtcacccatgctgttggaattggattcccttgatctcggtaaggtcggcgggccgatagcaacggcttctgatgccgctgtggaagcagcagaaactgaagcggcgtctactgccacggtagtagctctaggggaggcatccacgatagcacctggagcgcttaggtaatcgttcaaatcttttatgctgcgtcttccacgaagctctggagaaagtggcccattgttaccgcctaagaaagtcttgctagctgctatatctggcgtgccaattggtaccgtactactgccgctactgacgccctttcttatctcggcggcaaactggtcgaattttttgatggtctcgtcgcaatttccgacttgtcttgccactatccccatttggttctgttcatcggctaatgttgccccaccgcattgcagcaaaatcggcaaacattggatcgcgccgtattccatagctacgtgtaatcctgtgtttccctcttcgtcttccaatgttacgtccgcgccacattgtaagagaagagccaggcatcgggaatggttcgatcggcatgctatatggattggcgcccatcttctggcgctgctgcttcgcaggttcaacccttcttcgaggaaatgctgcaataatagatgtactgtttgttcatcccctttcgtaattgccaaatggatacacgtatccccgtcgtaggtttttaacattgcagtggcatcatgaccaagttggatcaaatggcggcaaatcaagtatctaccgtagaatgcagcgtaatgcaacgatgaccagccgttcgtactgtcgatgttctcgagcaggtctggccatcgtttgagaattcttctcacaacgcccaatttaccctggacaatcgcctctcttagtcttatccttggctcagggatcattggaacaaaattttataggtgcaaactgttctctctctttctttctcactctcttttctgtccatctattcttcactctagggtaaatacattgatttaagttattcctttattttaagattttattattgtactttttatcgctcgatgtttattgttctcttttttttacttataattttgatatactactaatgacaagtgaaaacgccagaagctgaaaaaccctgttaaactgctgtattgataatggaagaataagtgatgagcaaaggagaatatcaagaaaagtactatattaactcattcaatggccgataattctactaatcatcatccgaaagtgatattaccgagggaccaaactagcgttaatggttctgatgtgaacgatgccaattataacttaactgtagatcatgccttaaggtatcagaaactattggccaatagagcagggacgaacttggcaactggcccacttatgaccaaaaggttaagagaacagaaagaggggcaagattctgctagcgctcaggcagctcaaagtatagattatctttacataagagctaggttaccggatagaactgcgctggattatcaattgagtgttactagtacactccattcgttatatgagactataaggggatcactaatagagactgctgctgcgcaggtctcagtcagcttgtcgagccctttcatcaaactaaaggatgacgatactgttacactcttggatgctggatttagtaagaaaactctagttcttgtggaggttggtgattgttcgccaccatatctaaagcctcatcttttggcgaatgcaaaggcctatgcagaacaacaacagaaagaacaaaagatacaggagaattcaggtggggaatccattgcagaaggacccaagcccaccaggaaattgaccaaagcccctaaatggttgaagttaagcaaaaaataaataccaaaaaaatgcaatcattaaaacgcttatctagatatatacaggtaatcttcattcaacgtatctgtgaaacttcaaatcattcggattcaaccctaattgctgtaacttctcattcaattgatctttgctatagttgatcaatcgtaaatattccattagatcggccaataaattttggaagttctcctcgtcatctatgccagcgagttttaggttgttgagggctcttttgtcttctatttcttttaatttaaagcgtagagatctgactaattcagtgtcaagtgtgtcacgcttttccaacttcatctttagttgttcaatataatctttccttaaccctttcctaacatattctaccctggaaggggtaatgttcaacatctgaacgtcatgcatgtaacatagaacagcaaatagattattccattctttattagcggtgaatgcgcttataactatatttacaagttcatagttcaaaagagttccgtgctcgatagtcatcttattaaaaacatcgaacatcttataatcaagtctacttttgatgtcttttcgtttctgtaccgtagtgtgtatccagttatcactgcctcttagtttacaatttattagtctatagtatcctcggtatactttccagatctctttgtacaattttcgtggaggtatttcgcaagactttgacccaagagactctgaagtggagaaaaatctattaattagaacgatacaatcttcatatctctcctggcagaaaaaatgtctaagtaatgacaataacaacaacgaattgagtttcactttgttttcattagcacgctggatcatctgttccaccttaagctcggctgttctattcgacttgtttcgatagtactcggtgaaaagaaaataatggtgagaatttactggaggataaactgatgcgccttttttgactacatctttgttcgcttcttctttctttgcttcttctaactttgatagtaattttaatgcagcatcctcacgatcaccgatgagaagcagctttatgatcatttgtagctttttagatttaaactctaagttttgctcatcagattccgcagaaaagaattctagtaagtattgctgtaatacatcggaaacacgtctaaatctaaccaaatcgttcacattaccgtacaacaagtaactgaaactatttctaactttggagaagttatgtttttccattgcatcattataccaaccctttagttgctctaatttcttggttgcctcgtctggtgataaatatggttctaacgcttttccaaacgagtcaaactctttgagccattgtaatcttaatttcacaataagtgtattgaatagtactccgtccattttggtagactgttcaaaattggcgaataattgcataccttctttgctgaacccatatattatatatgaggaaatcatagataagtagtctttcttcgaaactttttgtttctcattgagaaagctgttcgcttcctctgaagaattgaagtttaaaaacccattcctcgacattgaaactgtgctgcgtccgccagcggcagcttcactagtattatcttccgcccaaccataggtcttaaccatagacagaagatgatctgtcaattgtctggccttttgcacatgtcttacgaacaatagttttctgatagcggatagtatgacatcaggtctaatataattctccccaaacgtgtccattgtttccaaatacaaattattaaacttatggaacttgttgctcctcaaataaatcatcataccaacttcataccaccaccgctcgttgacacgacgtttataactctcgaacaatgctgctgcagttttgaatttcctgaaatgtaaaagagaatcaatgtaaaaggattcatttccagggtccaatctgactttcttgagtccatagattagttggccagtaagatactgtcctctgagacggtatttcaaattaggtatcaatttcgataattcaaatgcttgtaccatttgatctaaggaaataatttgacttttatcgacaactgatgtgtcggataaagtcttctctaataaatctaaaagatgatttgtgttagtcaatgcatgtagcttgggtttcatttcatcgtaaaccacttgttgtataattttttcatcaaggttttctatatccgtggaatcgtcaaatatttcgctatccttattttgagtaaaatgacgattaatttcttcgggagacatggtttgaagtctttttatttcattttctgattccagaagtaagtattctaccacatccttcaatgaggtttccttctgtttctttaattttcgaagattcttctttgatttcttgaagcccggatttgtcaccgctaaatatgataagaaccaagaattcacaccagagtttatatcaacttcagtgaagtcatgttttttcaaaacagcaatgtcttgcttctcctgtatatgcattgcattatcagcatttttctttatagtggagatagtatttgataaacttttggttcgtatatatcgaagttgtcttggtgtaacgagtaaacttaatcgacttcgacaggttatcacattcagcattatgcaatatagaatctttctcttctgcaacgttgccttgtttcgctggagtgaacctcttcaacctcatctcatcgagataccttatttcatctatactattgcgtctgaaccattttcatgatttttcgaacgcagtttaaaatgaatgaaaagaaataaccgcacattggcttctgaaatccattattaaagactacatggtaatagagattttatgcattattacattctgggtttgattatatttatttttatatatcattgggtgtcagtatataaaaatagagatgcaaaagtaaaagtaaaaggttaatctataacttgaaaggatgaaatatgatattatgcttttatttgttggatggagaatattagttgattaaggctcatttcttcttgacacttttcatacgtccttcaaatcctgctcttttcttcaaatgggcagttcccttgaattttctcttcatcttctgttgtttgctcttcttcttacctttattgtcctttctaatctgtagattttcctctcttctcttctgtctttcggcaacagtgttttctaccacttgtttacgttcacgccattcgacggtcgacttacgcttcttagcctctttacgcttcaaagctttgcgaagtagtttctcatcatctttaagcctgataccttctgcttgcaacatggctttttgccatttttccttctctttcagtttaatttgatccaattcatctcttgattctaatgattgtttctttgtctctagcagtcttaaatgagctttaacgtcctttttggcaggtcccttttttctttcaccctttcttacatgcgataaatcagatgtagcctttgtaccgtcattgaattgaatactttggaacataacatctttggctgaaatctcttcatcaccattgcgacgatgtttcttggaaacgtgagcatcttctgcatccgagtccgaatcagaatctgcgctatcatcagaagacacatcaccagctttttcagaatctaacttggtggcccttgcctcttgtctacgttttctttgagcaagaatagcttctcttgaacttggcgcaccttccaccttggttcctggggcttttcttttctcctttaaagctttgattttctcctgtagtttacagcgtaattcttccatcttcttcttcttctgagaagagtcatctttggtacgttcgatggcctcctgttttttctgtatacgctctttctcttgcttctgtttgttctgatctactgggtttccatcatcatcaaagatcaccgctatactctcagattcgcccaaagtttgagaaatgtttatttccggtacttcgtcagattcttgttcctcggtttgctcctcctcgtcctcttcttcgtcctcttcgtcttcatcatcttcggacgatgtttcagactctgcgtctagtagttcacgttggatcttcttttggcctggtaaaaccacagctttcgcctgagcttgtttcttcttcataacttcgagggcagagctggattcatcgtcctgctgctcaggatccaatttcgatttcttatcctccttcaattgccctttgctcttcttcttggcattccattgttcctgtgtcttgtcatcgtagtaatatttcgcaggtatcaacgaaagtagcccttcaaaggcgctagaattcgatttcaaccgttcttcaagagaattgctcatgtcagggtggattggtacaactgagctgtgtaaataatatccttcttactaaacgaatcttagtactgataagtacattgctgtaagaacaagttaagtctctgtacctgtccggtgcgatgagctgaaaattttctatatacggttttgagaatatcacgtatggtgaatctttgaggtttcttttctacagggaaaattacaaaaaaaaaagaatacactttaaataagtcacgtgaccttagtcaaaacgagcggaagatgacttctgtatatacaatgtacagaagtactgtacagtaacagacttcaaccattttattgttgccacatgtacaccatcattcttctagccatttgacaatgccctcatagccaatgatacttgcccccaatcattacccacggctcatctctcgaagccaaaaattgaaaatccaaaacaaatttctttttgttccagccgctacgtgaaaagaagaagctctaaaggcctttcaattacttacttgatcactacagttaaaatagcccgtataaggaaaaatgactattcaaaatttttatgtttttccaagtttttttttttcttcagttttttttttcaaaacttctcacatttactttgtataaatatgttatgggtacgattaatagtaaattttttccattcttgttacttcgattcagaacacaattatttgtttgtgcagtgtgtgttcaagtttgattttcaatattcagttcaggtcataaggacgtccatacagaagcatctttttgttggatatcatttcataatggctcaaagcactttatttgttctgcctccttccccaagaagtatcttggctaaagctttggctaagtacttcaaggtagacgtcaacgttgttgatgttactgctgctgaaaataaggaattcaccagcaacttcccattgcataagacaccagctttcattggcgaagacggtttcaagttgcacgaattaattgctattgcttattacagtatgtgtgagattttttcacattttatttcaattgaatatattgaggttttccccgtcccttctgttctactcaattgaagccttggatgaatttaattttttatcttctgataatgatgagaacctttcaattatacagttatccctgtctgaatgggtaaaaagtttaataaaacatggtaacactcacgtgtcgaaaatgtatactctgacatcagaaatgaaaattaacaaaaaatcatcaattgcttcaaattgtttgaagaatggaacccatgggaaactcaatgactttctcatgtgttcctctttttactaacaaatttatccggaaatctttcccttttccccaatcgtatttgatcagtcgtcaacacctccgaagatgaagaattgaaggcttctctattgggtaagaacgctagagaagaagctgaaatcttgaaatgggtttctctatccaacagcgacatgccaaatgccgtgatgggcgctctcttgccaatcgttggtagggttccatacaacaagaaatccgttgacaccagcttggcacaattgaatgctatcggttccgtattcgaagccagattgaagaactacacttacttggctggcgagagaatcactttggctgatttgttcggtgctgctattttgtctaaagctttgtccactttgttggatgctaagtggagagctgccaaccctgccactgtcagatggttcaagaccgttgtcgcttccccaatcatctctgaagctttcggtaagaccgaattcgctgaagaagctttgaaatacactcctccaaagaaggaaaagaaggaacaaccaaagaaggaacaaccaaagaagaaggaagaagctgctgccgctccagctccagctgctgaagccgaacaaccaaagaagccaaagcatccattggaacttttgggtaaggccaccttcaacttggaagaatggaagagaacttactctaacgaagacacaagaccagttgccttaccatggttctgggaacacttcaaccctgaagaatactccatctggaaggttggttacaaatacaacgatgaattaaccttgactttcatgtccaacaacttagttggtggtttcttcaacagattgtccgcctctgttaaatacatgttcggttgtctagtcgtttatggtgaaaacaacaacaacggtattgtcggtgccatcgttgtccgtggtcaagactttgccccagccttcgatgtggctccagattgggaatcctacgaatactccaagttggacccaacaaaggaagaagacaaggaattcatcaacaacatgtgggcttgggataagccagttgttgttaacggtgaaaacaaggaaattgtcgatggtaaggtcttgaaataagcaagatgtttcactgcgctccaagcaatatttcatcaattcctaatctcgtttttttcacatactcttattttcaacctcttagtacattttccacttctcggtttgtataattaatttacgtacggctttaacttagttaaatctcatgaaatagaacacgaaaacaatctcatgaaattcaatggacactctttattgtaactgcaccagccagatatggtgcatgtcgttatacatttgactctttaatcacttcatacgatatttccttcatatggaagcattcaactaattttcgaaatcttcttaatagattaatctcgttttaaaatttaagaagtggatacaactgataggggttttcaaccataaagggtcaatgcaataggaaaaagagcagataagcagcccttttagtgagtaatctaatctccaatcgtttgctgcaatttacctaagaaaaaaagtcgtgacttctttttaagttttctcattttattctacacggtcaaactttaacatcctcattgatagtttgtacatcacgatagtcaccagccaaacatcagaaaaaaagatacagaatataaaactgattacaacatgacaactgcattgtacactgctaaagattttatactagtatccttgccggagaatgctaaaccttcacaaaaccctgagagagatgtttccacatggcttgaaactggattgatttctggtagaagttacgtatcagatttccctatcccagatttcaagattggatccttggatactcttgtcttacaatcggaggaattggcaaagattgattcccaaatctattcatcattacaaaaaatcgtggaaattttaaatgctttaactgacacacaagcttccgctatcagtattaataaacagtcgattcctgaatttttgacccatttccaatgggattcaagaaagttcaagcttgaaaaatctgtgaaagagttgattcacgatttatctatagaatccttccaattggatgcagatgtaagatcgacttattcaaactacaataatgctaagtccaacttcgcagctgccgaaagaaagaaaactggtgatttgtcagtaagatcattgcatgatattgtgaaggctgaagatttcattttaaacagtgaatatttgaccactgtattggtagcagtgcccaagaccttgaaacaggatttcgagaagcattacgagacattggcagagaaagtggtaccgggttcagcaacggtgttgaaacaagatgacgagtttattctttataacgtccaccttttcaaaaagtttcaacacgatttccaaaacgcctgcagagaaagaaaatacattccacgtgactttgcctattcagaagagttaattgatcagttgaaaaaagaacatgatacagccgccagccaagagcaaagtttacgtgtccaattgattagattggccaagactgctttccaagacgtgttcgtcaattggctgcacatcaaggctttacgtgtctacgtcgagagtgttttgcgttatggtttaccgccattctttctaacgaaaataattgcagttcctcccaagcaactatctgcatgcaagtcagagcttatcgaacagtttagctatttggcaggtaacgctttctctaaagataaacgtggtaagatcaaccgtaatgatacctcattacacgagtacgcttctttagttgatacagagtatgagccattcgtgttgtattccatccaactaccccaatgaaaccagaacaaacgatgaagtagaataagcatcatgcccgtaattcctgtaatatcatcatcatattatatagtgcagttcagtattcatcgtacatagactaaaaaaaacgtcaagaccaaaacgtgatcagaaaataacatgaccagagaaacagtcagaggtgagttgcgcattttttgagtctggaattttgagtatatatgcttgcactgttagacttttacggctctggagatcgagagtgccattatctgtcaaagacaacccttgatttcaccgcaatccgaagagaaatccggattatacccgtcagataaaaggcttggtagatataccgagaaagtatctccacacactgtcaaacttaaagtcttcctttgaaccgctattgcagaagtagccatagtttccatttttattctaggttactcttcgccggagacttctgactactttttcagtcttgccgatccctccaaattttgtctcattgtgtctttttaagtctttttccgaggtctgcctggcgacaaacacaaggaagagaaaatagtacgctatgaaagttaatgagatttggactagaaaagactcgaaattagaactagagtaacggctaataagtaattgctgcattagtaataagatgcagctacatgacgagtatctcaagtttgaaatatcccgtgatataagcattttgccggcatgaattgtaattttgctgaggcagtcatcgacgaggtgtgtcaatagtaattgaaccataatggtgtcttcaagtaagacttgggtgtcaattagcaattcataatatgaatcgtgaagtgttgctaatttactaagcataattactcatttacacccattcggtttcaggcattctggaataagatgtcaaggtaacaaacttatataaagaagaggtttgcacataatcacaacggtagtttgcaaaggtttaatttcgaagttgatgctcaattgtcaataaattaaacaaagcataataattgtaattcaacagacatcctgcctgttgacaagacacttaagttacaaggtattcttattcgtgtagtttcgggataaagagtcatcaaggaaaaaagtactgacgtccaaagtaacgatctcctccaaaaaaataaagttttaaaagatgcctgttgatatcgctaaaagatcagacggtaattacgacacccacttctatgctggtcaagatgagattggcaaggatggtgttttgaggattgcaaaggcttatagacaaaaggtggcatatccagattttttgccggcttggaatcctaatgaaaagtatccacctttggaattccacaagtttgaagaccctggtctaagagccgatccatctttcccaaatttgttgaatggcaaggtcactttaaagccaattactccaaaattaggtaccgagattaagggcttacaattaactcaattgagtgacgctgccaaagatgaattggctttgctcattgctcaaagaggtgttgtcattcttgaagatcaggattttgtcgacaagggccctggatacgctgaggaatacggcagacatttcgggaagttgcacatccaccaaacatccggtgctccggaaggccattcgcacttgcatgtgactttcaggcgtcctgaccgtactgaattcaatagagttttcagagacaaaactacttctattggtttccatactgatgtctcttatgaattacaaccggctggttataccttctttgctcaattggaaggtccagaatctggtggtgacactttgtttgcagacacgattgaagcttttgaaagactgtcgccacatttccaagagtatttgagcacattgcacgtgattcactcttcaaaagagcaagcgttcaattcaaagagtaacggtggtattcaaagaagagcaccagttacccacattcacccattggttagggttcatccagttttgaaaaagaaatcattgtttgttaatagatctttctcaagaagaatcgtagaattgaaaacaccagaatccgatttattgttggacttcttgtatagtttggttgaaaactcccacgatttgcaattgcgtgctagatggggaccccgtaccgttgctgtctgggataacagaagacttcaacattcagcttctgtggactgggaagatccagtcaccaggcacaacgtaagaattactccacaaggtgaaagaccggtagaggatctaaagtatttgaatgacccaacttatttcccgcaccgtgacgaagaggaggaagaagatgacgatagagtagtatactccaagtattgaattggctggccctacctctacaacaaaacctttttaacgaataattgttttttacggcgactactcttgatgagttttgctggcattctcctcttgtattttcactatgtaacatgtgtacgatgtcgaaaataaaacattcaaacttatggctctggcaaataataccttctatcgagtgacaaaacttttcattagtaatgagccccatgatcccactttagatccagctaatgctgttacaactactgctattgcgtataggtatagattcatcgagatgtatttccttaaaaagatctgcaggatccctaccaaaacgacctgccgttttaacaaaaacgttaataaccgtacaatagtttgtaaccccttcaaggatgtactcacaaggttatttaagtttcgcaaatttgattcaacctcttttgcctttaaaagagatctgtctgtttccttttctaaggccttaaattttacttcgatggtttgtgatacattttccaaatggcttgtaagttcaacattcatgttgtctaaattttcaacaatggaatttgacacacctctgacgacaggtaaaagatcgtcagtcaataatggtataacagattcatgcactagtttattgtattgaaatatgaggtgtatagtttcttcttgtgtctgcattaactcatcgctaattactagatttttatcacgggttaggtctattagatctgagaaaaagctgtcaataagttccatggatgtcttctggtgatccaagatataagtcgacatagattctaattcattgaaggctttgtctgtggaatttttgttcttttgaagttgtgccatgtattctgagtcgacttgccgaaaagtttcaattaagtgagattttattaatgatagatcttcattcacctcatcgttgagattgtcaaatgattcagtaaaattaaagaatcggatatcaaactctgccttcatcttgtcaaattcagtgattaattcttcgtccttcattttgtgattttggattaaatcattgaccagtgaattgaataaattttggatcatgtcaatattctccttaccattgatttctagatcagaactaaaacttttccaatagttttctatatttctttgaaattctgagtacatgtcagtaatattcaagaatagctcaaggatctgttccttttcgaacggtaacgaattctccatgcaaatatgtggaagattttgatagtttccactgtatgttgtccaccactgcggagatgactccaaagcattgacgcagcttatagtatctatcccacctaatcgtttttcatgacattcgcttgggtagttggttaacccagatgactcaaattcacaaactgataagcgtactgcggtgatgactctcaaatctgcatcaacaaattcgaaacctttcctcatacatatttcgagaaactctcccaaggcatttttaacacagcttgactgagtgatgggaaatttattattgatgtattcacgggataactctgttatttctagttgatcgagctccttttctattacgttagaaatatgtggcagtaattgaccggaagcgatccatatgctgaaaacaagaaaccacatgatggcttctcgtgaatggattagaacagtatcccaagcttggtgtgatctggtaattcattaacaagattttgcctcacccattttctaaatctccttttataccgtaagaatcaataccagaaagcagctgaaacagatgtgaaacatcaacaaaaaaaaatgtcactatattagcactatttacagtaattcgggagtaaggtttaaattgttttagtaatctataacatgtgtttgaacaatctatcattttgaatgttggaaactatgctctattgttcaaaaagtgcagtagcgtctctctatcaactccagtaaatccaaactgatcaataaaggtggtttgatttttgacaacttcgataactttggtgatctctttgacaggttgttcgttgataatggtctgtactgctctaaagttagagttagtgagtaatgctatgataaaagcaagaagatttgcattcggtacagttccattattgtatgccttaattctataatataatgaagaaatgttaagactattgtccacttgagagtccttcaactgtgcgattctaagcacgaagttgttgacacaagattttgcaatgtctttagagtattttgatttgagggctaagtccaacaaagcaaatatctctgattggtgaatacagtatggtaacaggagatcagtcattctgcatgttaaattagaggcgaataccggggaaagtacgtgcaaaagataaagttttgattttctttcaagtggaacaatgcctgcatctgtttcctgaccagcctgtccgacgagttcaatgtattcttctatggacggtagagatggcataatacggcgagatgccaaagtttctagtaaaatccgcgacaccttgatatccttaccctttaagaatgtatcaaaaagcttatcaagttgaacattgttgagattagttattatattttggtttaaagattccctgctactctttatcacgttccacagtaggttaagggctggtgtatcaattttcgtgaataactgttctcccgagagaacccattgaatcaataatgtgttgagcatatcaatatcatctatttccttaccaacatattttggtaaagttttcaaggtggccttccattgcggaactgttaagttgtctctctgcaatatgtacaaaaaaatctcctccaaatagataacttcctgacctttatggaatatgaatagcttgctcaattcactgtctaatgtctcgaatgacagctgtggatggctgttcaaaaagttgtctaattgtttaacaaatggagactccgaggtcagtttcgtttttctcacttttggtccggagtctgatgaagtaatgttgactttatgaaagagacggtctccggatttatgtattctctgaacccattttgatacatctttaactgtgtcaaaactcaatctggattccactagagtagattcacttgtcactgggtgtctcacaaatgctggtaataccggcttcccattgaaaagttttggattcctttcagtgatgcacaaagctgtgcgttcggtagcattaggatattggtagaatggatgtacaatcttgttagctgctggaaccacgtactcaggtagatgtccccattcttcatctgctactttgaatttgttttttggaaccagtagcgtcttgcccggttgcaacttattagcagctctagaaagtatactcatatcacgggaaaaaagatgagagagtgaaatgtagatagtagatgcagtggttaacgtcgtagccacagataatatatagttttccccagatgtgattggtgaacggtcccctataggtctaacgctgtaggttgagtttatctaccatgctgaaataaagctttttttttcagtttcgaaggtgcttgagaaaatacaagttcaacactgttcaaatcatcgtggaattacaattaagagacgcagcccagtaaagagcaccctgttcaaagaatatgatactcttttactacaccgaagacagcattagtttatatatatatatatataaactaattttctcttgatggtgttattccttctctatgttaaggcaatgatgagaatttgtcactgctgataaatggatatcgttccagtatagtattgaataatagactaatcgtttattatgagagttcctctgtaacgcttgaaagtgaagcaagagagttaggtgtgatatacattcaggacttcttgtcagccatcatcttatgccagatgtatcaacaatatcagttttttttttcattggcaatattgaatcgatgatgagctaagaaaattttcagcagaaacgtaaatagtagctatttccagagatgagatgcgatgagctatggaaaattacaagcttggttttgtcaaaggtcttttcagctttcttgagttgagattattgctattattgccaaccacttgctgtaaggagctagcagtgaggatctacagcttccttatttgttgacccactcgagtttgattcaactatagacctatcactcagatgggaaagaagagtaaagcggttcaagaccggcagaatgggaagtccattggaaagaagaaatccaatgcaaacccgttaaaacgtcacgctgggaagaagaccgtagttacttttgatgaccatcaagatggagatactggggattcggattccgaagccttggatcatgtgtcaaataaagagttaaagacaagggcactgaggttattgaaagggcgtgagagtttaccagtattccagaataaggaaaagatcgtgtctcacattaaagctaatccagttaccatattgattggtgaaacaggttctggtaaatctacacaaattccccaatttttgatggatgagatttctccgatgcacaaaggggccatagctgttactcaaccacgtagagttgcagcaatcaatcttgcaactcgggtggcgcaagagcacggatgtagaattggtcacgaagttggttattctgttcggtttgataataaaagtcacaagacaagaactaaattgaaatacttgacagatggtatgttaatcagagaattaatgctggacaagaacctatccaattataaatgcataatcatagatgaagcacatgagagaactatattgacggatttgattttaggttttttgaaggaacttcaactgaccaaaaggaaagatttgaaagtaatagtaatgtctgccacattacaagcagatctattcagcaaattcttttcgaacgcacctatactattcgttgaaggccgcaaattcaaagtagacagatattatctacccagaccttgtgaagatatagtggatagtgtggtacgctgttcagttcagttaaacagttcagaaactacaggagatatactctgttttttaccggggcaagaagagattgataaagcagtggccattttaaacaaaatcattccatatttagacgaatctgtaccacgcatcacagcatacccactttatgctgcattaccaccaaaagatcaagctaaagtcttcgaacctttaaagggattcaaaagaaaaatcgtattggcgactaacattgcggaaacatctgttaccattcctggagttaaatatgtgatagactgtggattaaggaaggtgaaagtttggaggcatcagttggggctagctacgttactaactgttcctgtttcaaaggctagtgtagcacaaagagccggtcgtgcaggcagagaaagttcaggtaaatgttttagattatttacagaagctgattacaaacaactgccgaaacaatctgagtccgaaattactcgatgtgaaattacgtcccctatcttgatgttgaaacagtacggcgtacaagatattgtaaactggtcgtggctagaacatccagggaaagaagctattatctcggggctaaaagaattatatgaacttggtgctctcaatgaacagggtcgtgtcactgatagaggtcgcaagatggcgctattacctttagcaccacatctaagtaacgttttgattcatgctcaagagactcaagtattgccatacgtcatagatatagtatcatgtctgagtgttgaaaacttggtgttaaacccattgcctgaggaacgagatgaggtcaacgaaagaagaagggcattatgtaccctaggcagtaagcacggtgacctaatcatgctaaaagagttattcgacatgtatcaatcattacaaagcaattcggagaaacaagaatggtgtaaacagttatgtgtatctcagcgtggattcaaaaacgtgattaaagtcagagaacagttgacagggtatatgaagagactgtacaatgaaccggtagaaattaaaacaaaacaggacaccctacaaccagaagaagacattgctacgaatctgttgcagccgccagacattgcgggtgttttaaaatgtttcctatatgggtttgtcaagaacactgcaattggaatgcctgataaatcttttagaacaacgccaacaggggaaccaatatcgatccatccgtcctcgatgttattcatgaatagtggcgatgaaataggtccatgccctgcgatattatacatcgaacacgtattcacaacaaagggatacgcgcggtctgtttctcgaattgaattggcatggctgcaagaaattgcctcaggcgttttgaagcaatcgacaagataatgagagaattattcgcggggtaaaggaactggtccatcaaccaaaattttccccgtacttcttcgcattcgaagtacagtaaatgcaggatctaaatagggaactgtatatattaattaatcacatcataacgatcatatgcgagcaaagcacagttaattgtaaatagtgtaaaacgaaaaaaaaaaaaaaaagaatgaaggcacatttgattttcactggtaatggcctgtgtgagttctttctgtacggcactttcagtcaaatctcttcaaacagctctcgaaacataatcgaacaataatgtgtgtccagatcggaatacagaataaagaaaacaccgaggaaagaaacggtttttccgtttgtggccgtacttctccaagaatttgtcgtggtatttttttttttatttttttttagtttttttttagttttttttttatttttgctcttggaatgggatgggaagagataattcaagttctacgtaaactcagtgggtatacaccagattgttccggtggttttcttattcttccgtatatagtgctctgtttataaaaagaaaaagcggcaagacttgcgtaattcactggttattggtgcagcgctgtcattagtaaaagtaccagctcaacaatgggtagtatggacgtagggaattacggtcgagagggtcaaggattgagtgggagggtcaagttgacccccgcccccgcgctcttttgaggctacatattaggtaccttgcaatactgcgcagtttcttaacgccattcctggcttttgaaacttttctgccaatgaaagacatcaaggaagaaagccatcctccgggttaacaacctatttattgaattagggcgcttcgaatacagtggttctgcacttttgagctatgtttgaattgatcgcctcccacccaccccgcttactttaatccattcttgctgcggcagctgtcatgttttcttaattattggagaataattgatagtgcttattgatcagctagagccattcggcaaatcgtacgtacaaatccattttattttagcagaatcatttgcttgtttgtagccttgtgaagtgtatctagtacctggttgtaggcccttgtcttctactcggctgttacgagagaatatccgtctgcggtcaaatctatactatataaaaaaacaaaaaaaaaaaaaaataataatacttgactacgggctcaaacagttctaggttaatatgatgtaatcataactttaaccctctcaactagctgtatcatttacgtttagacattctatcctttttattttttgtagttctaactttatttgaaactgcttcctatgcttgaacagttattcgtcataggtgtttctttttcagtaaccgtattcgtaattaaccagcttaacattttatatatatacatccaatattcctgctcatccatcccatttgcattcttattagttaaacacatttcaataaaatctggagtagttgttgtcatcttttgaaaatacgaaaatacgtatcaacaaactttctctactgtaaaactgctttctttcgagcgaatttttttttccttttataattaagatagcaaacatctggaggagttttaggtttcgaaatttcatcatgcttgccaaaattgttgataagttcacaaaaagaaccgatactgccggtttggtcggtagatcattgcgtttagcagtgacaattacagccgttactggtttttccttatttggttatgatcaaggtttgatgtccggtatcatcaccggtgtaagatttaacgatgagttcccaggtactaaggaaacttctgacgacgatagacacgctacagtggttcaaggtgccgttacatcctgttatgaattgggttgtttctttggttctttgttcgttatgatgagaggtgaaaaaattggtagaaaaccattgatcatcttcggtgctcttttgaccatcgttggtgctgtcatatctacagctgcctttggtgaccactggggtcttggtcaattcgttatcggtagggttatcaccggtctaggtaccggtatgaacacttctaccattccagtctggcaatcagaaatgtcgaagcctgaaaacagaggtctcttggtcaatttggaaggttccgtcattgctgtcggtaccatgattgcttactggattgatttcggtctatcttacgttgacacttctgttcaatggagattccctgtcgctatgcaaattttcttcgctattctattgatgattggtattgttcaattacctgattctcctcgttggttagtcgctcaagggcgtcgcgaagaagctatgtacgtcttgggtaaattggatgacttggatcctaatgatgaccaaattgttgccgaagtcagtactattcaagacgctgttaaccgtttcaagcaccaaaagagatctatgaaggaattactacacggtggtaagggtcaaaacctccaacgtgctttagtagctgcttcaactcaattcttccaacaatttactggttgtaatgccgctatctactattccaccgtgttgttcaaaaagactatcaaattagaagacagattatccttggttttgggtggtgttttcgccacaatttatgctctatctaccatcccatctttcttcttgattgaaaccttgggtagaagaaaattgtttatgttgggtgctttcggtcaaggttgttctttcttgattacatttgcctgtttggttcatgacactacacaaaatgctaagggtgcagccgttggtttgttcttgtttatcgtcttcttcggtatgtccattctatctctaccatggatttacccaccagaaattgcttctatgagagttcgttccatgactaatgccttttccacatgtaccaactggttgtgtaactttgccgttgtcatgtttaccccaattttcattcaagacgctggctggggttgctacttattcttcgcgtgtattaacttcctctatttgccagtcatcttcttcttctacccagaaactgcaggtagaactttggaagaaatcgatatcatcttcgccaagtcttacactgataagactgctgcatggagagtcgctgccaacttgccaaaactatctcttgctgaaatcgaagatcacggtaacgcgttgggtctatacgatgacgatctagaaaaggaagatgaattagaagaagacgttgacagcaaggaacaatctcatccaggtttctctttgttccaaagaaaaaagtcttctaagaacgttactgaaaataatgctgaaaagtccgatgcaactgctaacgataacactcaaaccccatccagtaacgaatctaacgaacaaaactaaacatcatcatgcagttaattcagtaacaatgtcaaataattttgctcgacgtaccatcttaatttctgtatcagggatgagatatgataaattttaatgaatagtggtacagtagtacgcgtacccttcaacattcacattccaacctttcactaatagtatattaattaataccataatattctctattgttatgtttagagtctcttccttgacatatctaacccagaagcttcagatgcttttcgtttgactacaggaagaggtgatattctgttccaataatattcaattgtccaatcatttactggaaatatgtacattgttaatcatagaagtataccaaatcattttattcgcatgcgaagactcttccaatacaagcacttatcaggacacacttcgcatgatcttctccataagttggtgtgttgatgtggttgaccttttatttttttcttccttgattctcccctcatcgctattaaatgcctatagagaaataaaagatgagattttccggaattaaacttctaaagcacgagaaagcccttttctgctatggctggttctatgtattatataccgaaagaagacataaatctaaacatcatcaacagtttaaagaagcttgaatagcaaaccggacttgaatcaagcctttaatttaatcaacagagcagtactttatactctttcgtttgcgtctaccgaactggaatcaatgttctttgaaagcatttcggtgcgtggtagcttcttttttttcaatatttttcacactaagcagcttttactatgggatgatgaatatcaacaaattctgaatatttttatctatagatatcgatcttgacattaagagtcatactgaatatgttaatgaaactgaaacttgtataaaaacaacccattggtttcataactttttttgtttccattaaacagattgagcatcggttagaaattgtgcttctggaaaaagccatttgtggagtaactctataacggaaaaccacgcatattatttaacgatgaaggtcactttttcgcttatgcagaaggcatcaaaacagatagataagttcgcattgtacgttcccaaaagcggcgtgtttcctaagggattcaaagtagccactcaagctactggtgtcaagaaaaatggcaatttagatctaggtatcattagaaatgttaatacatctcgtccatcgagtgctgctgctgtgtttactacaaataaattcaaggctgctccagttcttgtatctaaagaagtattggaagttactggtggtgagaatgttgatgctattgtggttaactctggatgtgctaatgccgttactggggaagtcggtttgaaagatgccagggaaatcgctggtgtggctaatcaaaacttgggtaaacaaaatgccactttggtcatgtccactggtgtcattgggcaaagattatcaatggataagattgtaccagctctatcgcaacaattcgaaaccaatgcgttcaaagatgatttcgaatcctggttgaatctggccagggcgatttccaccaccgataccttcccaaagcttatttcttccaatttcaaattggccaacggtactgagtatactcttaccggtattgctaagggtgccggtatgatttgccctaacatggctacattgttgggattcatcgttaccgatttgccaatcactccatctgcattgcaaaaaatgttgcgttccgccactgatcgttcctttaactgtatttcagtagatggtgatatgagtactaacgacactatcagtatgcttgccaacggtgctgtcgatacagctgttattgatgaaaacagtcaggattttgttcaagtacaaactcaagtaacagaatttgcccaacggttggcacaattagttgtccgtgatggtgaaggatccaccaaatttgttactgttaacgtcaagaacgccttgaatttcaaagatgctaagattatagcggaatctatttctaattctatgttggttaaaaccgctttatatggtcaagacgctaactggggcagaattctttgtgctattggatacgctaaattggacaacctacaatctttagatgataaaaagatcaatgtgtcctttgttgctactgataattcggaaccaaaggagttgaagctaatcgttgatggtgtaccacaacttgatattgatgaagcaagagcatctgaacttttggcacaacaagacttagaagtactagttgatctcggcactggttctgaagagtgtcaattctggacttgcgacttgactcatgagtacgtgactatcaacggtgactatcgttcgtaagtgtttagccttttactgcattaaatcacttataatatgtctataggacattccagatgaaactttcataatcttgttattaaacttaagtaaactattgaattgtgactttatcacttaaaaactctgaaaacgcatgagcttcaaagatagtaactttgaaatattgtcgctttggaagtactttcaaaagctcaacaatttcggggggaatggggtcttcattggctttgaattttttgaaagcttgtccgtcttcctcctctcgcattgtgcgtttgagattattagagccacgatccaaggcgattgcttcaggcatgacatcgcggaccatataatctagctctagcctttgcagataattaacatcgagcaccttatatttgttggtgaattcttctaacttgttcacttcaggaaacttctcaaagaatctcttttccaaagttctcacactatttagagaaccaaccttagattcaaagaatataactttttggaagatcatcttcaaaaggtgagaatctgagattttgtcaatactactctcaaacaaagatttgacttgagattcttcattgacatagataaggaagtccagatatttgttaatatactcaccatccgtagcaaaatatttaagtcccaattctagaaccttgcacgcagttttggtatccttgctgatgtggtactcgatatatgcgttctccaagtaaatatcgggtgttacaagtttttttaacctacggcatttgccaaagattttacgagacgctgcaagaccctgtatcctcttcattgtattcatgtatacgcagtatacgtatgttagttttgatttcagctggttgatagcactttcgtttgttggatcatcttccataagtgctgccaaatcaagatgtatgcggtcaatacacgataatattgtggtttctatctctggtattttggtatttaactcgtactgttctgaaaggctgaaagccaatactgcagaatttggtatgcattgctgtcctaacttcaagtacttagtaataacagtagaatcagtatttttctcgccttgatagtttgccatattgaaccaaatttcaggtgcaaagcagacatgctgcgctgcctgcatatatacatatgtcattctggccttgtgaaggtcatctgatagttccaacttgttgtctgattcccaacgaatccattccaaccatataagtaattgctgaacatcgtactcgttgggtttcggaagattggattcagtggcttgatttaacgtaattggtaaatttcttttcaatcctttcgtgatgttcaaccagtcctgatacaaagatctcgcattcatatactgggcagacagctctccgatgtgtctacgagcagtaagctgattaacatcctgttcccactgagtatatctttgccacatagattccaaacagtccattggttgacataatagagtcttgtataatttccttatatactgaactctctgttgctcctcaaacttgttgacaggcttccaatgctctaaaaagtgaaggtattcattccaaaattgtattgattttggttcgaaaatggcacacttatctaccacgacttggaaagcctgaattacgatgtttctcgcttcttcaccgccggtgataatgtcattcttctttctcacataagttatataagataaccataaagagagatcattgttccccaactctttggataaacagcgagctagcaccggttcaattacagcagcatctagctcttccatcttatcaaattcaaggctcaatctcatacaccaaatattggccattaatgggaatctgtcatgcaatttgtcgaacgtttcataaacctgtttccactgcttcaatgagacgtggtgtttaagtagcttcacatacagaaaaatatctgtaggttgctcttcgatcatatcatttagcttcccaataacatctgactcatctcgtaccctacttgtggggcgtagagatgttgatgtattgctactacttggaagtggatctggcgtagctgtaccgtctgacatatctcttttaatgtccagatgacgtcttagaaagatttctaatcccttttgatgtcaatacgtcaatttcagctgaagattttactggtctaaaaagtgttttctttataagcagctgagtctcagctctaatccatgtttatggtcgttccaatccatactaagttctttttaaatatgtacatcttggcttttctgcataatcagactagagattattttggatttttgacagcgattactggtactactttaaaggagggtaactctatcgcatcttgcaatgaagtttagtggaagtagcttggaacagtttgagatttgaatggaatcatcgaccagagagtagctgttgtgtgacacaggccatgcgcataacattgaagacgatataagcgagttttttgatgactcaatttgtgcagagtattaaaattcgatgagtggttcgaaagttttgcatttatgggggctcaatggagagccttctctagtttctccagaaagtattgcattatgttggttgttgaagggggggtatgttgccagtggaacggtccaggtagtttattcgaataacacagatctctcgccaacgggtgaattgcctatattgattgatacttctgctaagataacggttggattgtattcgatcattgaacacttggttcatgacaatgatgtgaagttactttcctctgcattgttgcagttcatctctgaagaattgaagacatgcaccatgtatcagttatatttgaatccagtcaattataacgaatacacaagtaagatatattcgtacctattgcattggccgttctggtataacactccgttgagtgctaggagccgtgccagggaattatgtcgggatattatggttacaatccctgaagatgaagaaaatgaaagcacaagcaatcaccaagatgaattgagtgagaaagccactgaattagctcaatctaaggtatttaaaattacaagagatagcaaaaggcagcaaaccaagaaacttcaagaactaaagaataactctaggttcacaacgaaactggacaacgttcttacaaattgggaaagtgcaagacaatctttggcatcagctgtattacctgcagatttagtacttgtagctcatttaaaggtacagatggccttacctcaaggtgacctgttaagatcgcatttaagaaatcaatatcctagtctttacgataaggttaacgaactcatagagaaatatgataactcaccagtaccaaacagggatccaacgtttagcgaaagtgggaacgtggtaacgtcaacatgctattttttgagaacgtttgtctagcgtatacataaaattaatgattttacaattcgaacaggttagcttttaggaaacgctccttttcaatttttcttgggcttccttaagcctttataaataaagtaatatacaactgtaccatcatcattaacaatccccaaggttaaccttttgatcatgtccggaagccgggaaaatatatggtccaaactcttcatcgagaaaccactatttttatattgatgcattagtataggataaacgtactcttttccgtcacttggtatatcctcgctgttgctagcatcggcatcattatcattatcatcattggttagtctatgagatggcttcccacaaactattggcacatcttcgaaatttataatctccgtctccgtccataattgctggtagactaaattagtgtaaaccacatcacaaagcgcagcattcatgctaaccatatacaaccctacaaaacacactaccgttcctggagtattggtggctatctaattgccatcccatcagaatcatcagtgtgaactcatctcatctttttgtccgttcacacagaaaagctcccgagttgtatttttccagcttcaaagatgtataaaaatgcatcaaacaatgtagaaaacatctggaaatttcaaacatcattaattcaagtatttagaataaaggtgatttgaattgtgagtctcctctgcaaactgtgacatttgaagtctgtttttatattgcagttgactacttagctcaattactttcgcagaatgattttagcatcctggttggtcttttcgctgttattcttacttgaatctgcgctaggatacagaaatgtgatccagccaaagcatactactaccacatcagaaaccccaaaaccatggatgcgtaccatttatgggacgcagcctgaaattgtgactcctactgtgattgctggtgtgactttcgggcatccaccaaaagttactccagatccattggaagcctgggtttcattaaagaaagatggttctccacagaccataaagccccaaatcaagaacggccgtacaaagaacccatcacctgattatgggacatactttaagactgcttcagttacaacttattccgaagaacagttaattgagatgggtatagatcctgaaggtccacatgaagaggaagtacttgcggatgaggaccttacctatttatcattgaaccctgttatcagatgtactcctgaccgttactttaacaaaggtttggctaaggacgaaactagtgcaccattctgtaccccaaaagaaaacgccgatttgaaagttgataagacatattttgtgtcatggttcactagattcttcgaaaatgatgacggtgtgaaggaagatgaagttcgtgttcatttatcatacgtccaggagaaagctcatgataagggatatgccaaaagagaaatgaaggctacgtttttctccagtgaatggttgaaaaatcttgacggtatgtatcctttggaagtaagggaagagtggctacagggatcatataataaaaaggtagttgtttctgttcagcctaagagtgttccagacgatgaattcgatccattggaacatggtgttgtaatcaacattatcttgggttccaaagtgttcaaaactaccaaagaacaattggccctagaggatcaaggtattactgacgatacttggtactatgttgcaatgaccatcccaacagcagtattatttgcagttgttttcatgtacttcttcgtacaacttaatgctagatacagagattttagcgatgttaaaagagacgcattgaatcaaaaacgtagagtcattggtaagttcaaagatatgaaaaaatacaagaacatcaagaatcacaaatatgacgaactccctctacacaaaagtagtaaacaaagttgaaaagtaacgaacgaatatgtatttactctatataaattttgtatagctaatattttatgtgcagtttgaacatttaataatcaaaattgacattagtcaccaaaatgaaaaagctgttaagaataagttaagaataagttgagaacgatgtaaactagccctttaaacttaacgaactataaaagacaatcttcagtgcttgaactcatgaatatacaataacaaatgctataaacctattcacctgtagaagaaaaatatcttttcatatccaattctccttggccgctacttcacagattttttccaaagtagctactcgaggatcaggctttctaggctctttgtctagtccatcctcaggatcaatgacttcgatatcaagactacttgactcatccggcaaatcctctatatagtaaaagaacggttcaagaacaaacattattttccaaaagtcaactgaaccgcagtttgcgaacagcacatcgatcaaactaggtagataaaccagctcaatatactcttccgcacagcatacaaactgatccaattggtaatcctgttcctctacactcaaagtagagtacatctccgataataaagtcaattctttgcttatggtttttggaatatcttgtcttgccttccaaagaagcttctgagcattagctaatttgacttccacattatcattatctgagctcgatttactatcgagcataaagccggaattctcactcttttctatcaagtcgttgtattcattgtacaaagaaataattttcatcataggtttgtacaactgttgacatacttttctctctgatttcggtatgataaccctttccagataatgattaatcaagccttccatgaaattagcccatatagaactgtagacgtagttttcgtcataaagtgtctcatcaaaattcttcttgatattctctctcatcacattttctaacaaagtacagaacaattttggttctttcttgatattttttggctccacttcttcctcataatccgagctattcggcttaccatgtttgtccaaccaatagtctgggccgcctcgttgtgagagtgttactagcaatagaaatagttttaatttatccattggcctgatcaattttagtactacattatcagaaatcttcgaaacatcatgattgatctttctgtgaatgcatgatatgaatgagtgtatgatacgtgctgtcctctggccataattggtgcttaaatactccatggatgttacagttttataatttgtgtcttggaacctcaaatctctagtaaattgaaacttgtatcgcacttgtttgcgcggcttgcgagttgcgtgtggcacacgagcttctgcggacattatcactatatcctgtacgttgtcgagtttctgtaacttgctaagggtaaggccagccacttgtcacctttacaaattccttcagtgaatgttgatgtcttccaagttttcaacacacttttgcagtatcaaaaagtgaaatttcaatagttttgtaaaggaaaaaacaagataaaccaataatgacaaacccaccgttagcatgtatgacaatactgaaattttatactgaaatatccaaaaagagtttattggatagaagataaatcgtttcaggttaatcaatgaactacagttttgtcttaacagtaatgtgaaatttcatacacggcaagttattgtcaacgtgagtgcacactaaaacggctaaaaagacgtaaaataaaaaatacattacaaaataatctactaaagatataggctgaactgcagttcaatggcaaagttctgaattaatgatagatctatggaatttccttgtttattatatttataggaaaagtataggcactgatcgaatgaattgggggtttggaaggataatattagttcattaaacgacatgaggtttactcaatgtttttagatgttctggaagaatcttcatccgagttgatatcagaaacgtcgaccttttcgacggcatctggatccatacctaagtctctgattatttcttcttctgacttcttaacacccatcaaaccgtaggttgatagggaaattaaaccaagaacacctgctagacaggaaaaggtcatagcaacaatacccttagcagtgaaaccatctggaatgttagccacttgaacgttttgaccgactagatccaagaaatcgttagtgtttcctgcagcgttaccttcccaagaaagaccgacattttcgcagacttgcttgtggttatcagtcaattgttgggattcagtgttttgcatttcttctggtgcttcaatcaacaacaatgcaagaccttgcttcaaatgccattcaatgtgacaatggaagaaccaaacacctggattgtcggctttgaaacgcaagactatactggattgtggattcacgtaaacggtatctctcatcattgggtaatctgggaaaggattgtggtcttctggatcgaatggatgaggtccttcaccaattgcatcatcgtaaccacgttctctgtcaaccaattggaaaatgtgaccgtgtaaatggaaaggatgcttaccagtatcgttgttattcaagacaatttcaataatttcatcctttttcaagacgaaagcatttgtgttggtaccataaaccaatggatttagtgcatctttaccagccgacaaagcagtcatcaatgttgggacctttggagcagtgaaagtcaaattattgaagaaagcgtaattgacaccatttttcaagttatccatgaccacatcaacggtaatagtataatcagggtcttcatacaattcgactttatccaatggggtcaaatagaaatcatccaagaaatcatctatgctgtctacatagctttgttcaggcttttctccatccttgtcgtacatcatgtaagaagtagcgttcaacatcaaatcgttaggaataacgtctaacatggtatcatcaaacttctgcatgatagcatagtttttagaagtgtcattcttagtgtgaatcaaaacggagtaacgttgtgccacagtgatgtaaagcatagaagttgtgtttttttcaacgtaaacaccatcaacttcaacgacagtcatatcatggtcctcaatccaaaagtattgtgagacgaatccaccagtattgacaattctcaagagatatgtagtatctggttcgacattccaggtcatgtttctagtgttgttaatgatcaaattctgaggaattggttcggcaccagttgggttgtaaacgttcatgaatttgcggtcaagggtatcgacattgtcataataccattcggcaagttgcacaacgacttcttcgtcataatcaaatggcaaagaatcctcaggctcaacaacaagagtacccttcataccgtcctggtattgaccaccagtgtgggaatggtaccagtaagtaccgtcgttatcatcgatggtgaaattgtacaacatggtgtcaccaggagcaataggacactgggtaatcatttctggcccatccatcatgttagttccgttctgggacaaaccatggaaatgtagggatgtgtttctatcatcgaatccatttgtcaaatacacttgaatacggtcacctctcttgacctttaggtcaggccatggaaattcaccattacaagtgataactggtctctcgaaattaccatcgacgttatagttaccccaaccagtggtccagttgaaggtatgagtggcagcttgagcaacagtagcccaactccacaaagccactagcaacgatggcaggaagtgatgagtcgataccttcatgtctttatacttccttttttcttctttttgttcttaaagaaaaccaatgagacttaaagatatgcgatgagatggttaacgcagatattgcaaataagaaagaaccctgaagacagataacaaaaatctcaactgagcaatatacacctcgtgcagaggcctaatgacaacattgagaacattttactgaaattaccattgtatatatacattaatatacacattctcacacgatagaaccaaccagtgataaaagaaagaaaaaaatccatctcaaacctctgtacaaaagcccactaccgaccgcgccgaacctactgcaatatgaagaaacgagatatcaccctcatgcacactacaataccctctgcctctacttctttgtgtttttcctccctcccgaactaaaccagtctctctaaactgtcaaatggttatgcctggtattgaaaagcacacctgcaaatagatagtaatatggaattaaaaaaaaaaaatcttgaggaaactagaaccaaaatacctaggtagtgccacaatactaagtcaaaaattaaacaattcggggtgtacaattcaagataataacctaattagcggaagtaaaaactgcgtaaagaaagagcaaggtaataatacacttactacgaggacttaaaggggaaaaacaactgataaacatggaaagagttagtcgaccaaacagaacgtccgctttcctgctttcctttctgagccaagaaactgccattcctatttttttttcttatgtacttgtttcactacgcttttatgagaattaaacaaagatgaagaaggaaaaaaaaaaaaaaaaggtcaactgtagcttgcctagtggtagctgtgagtgttgaaattggaattggaattatgattgtattgaaatgggaaaaaattgagatggtgggagagtaaacatcagggcccaactgtttgaatgggaaaaagaaaaaaaagaaaaaaacggaagtgctctacttcttgataataagtttccagggttttttgtaatggtagttgctacacccacccccgccggggttttcgagcgataaagtttcagccaattctttcctgccagtttacattctttttcttcattttattttttccttccttctataatttcttattcagttcaatggaatcggaaaaaaatatacaggctcgaatgagaaaggtttttgggcccaggcccaaaaatcaaggccccgaatagtctccatacattgccaagaaagtttttcagtttttagcttttctaaataactacaagataaggcgcagtatattgagaattggatttttttcatcaatgctaatagcggatcacttctccaccgttcttgttccgtaggtggaggagagcctttagggtgagaagcggatgaggaaagggtatccgtaacggccccatgtcactgaacgtgccagaagccctttgtgagcgagcaccaagatttgtcagttttgaatcttggcaaacgagtaaatcatgctcgattccgggccttttgcgttgtcattcttcttgagtaggtaatcggtacacatagaagtgtgctatatctaatctatcaacgatgccaagtttatctatggctgcacttgggccgaacgcccagtactgaacgtaggatacttgccaattttcgctttttcaatttatttttttatttcattacgaatgagaaatacattattgcacccagggaaatttcatggaatggtcagttttctactgtaggtcgaaactgcaactctcaaacttgctgtaattactctattttctatactctatatcgtaatgatgttcctatttaccagcgttctttttcttttttgataattttcatacaaacactttttttccaccatttttgaattgatatcgagttatgtacaatttgaacgagtcagtctaggtgtttaatccagaaccgtgaaaaaaacagggtgccattttatgattatgtgtatatatgcatgcgtatgtgaatctttttgtctctaacaccgataatatagtcttggctagttttctgttcagacggtattctgaaagctacatctgcttcgaccttcttaacaaaatcccgatccacgtgatcgaattatttgtcacaccgggtaattaacatatcttggttagcctttgtttaccatttatgcgaaatatggatctgatccaatgcataatatcatccatatgtctaaaaggtgcatatattttagaataagtggtaataacgccagttactggccagtactctagcaattgtcgacgatatcgaaatgtcgattgaaaaattcatctctcagccaccgctcatagttcattcttcgctttctcaactgcgatacctcgtgttatcagaagggttgtccgatgaagatcatcaacgtacaagatctcacgtttggtccatcctctcccgagcatcgctggaaaaatgtactcaggaatacctgcggctagtacaattaggcgcaccaccatcgaattggatctctaagattaaaaatgatactttcagaacgctatccacagatgaaaaatttaggaataaggtcactgaatcgcaactaattagagtcctatcttgtttcgcatgggatgttcttgatagtaaccaaacacatgaacttccaggtctttccccttatgtgcagggtatgaatgtgctgctggcaccctttctatacgtttgcccgaccgaacctattgcatataaactgttccattcgctttgcttccaaatgatacccacttatttgaaccagtctttatccggcgttcatgtagcagccaagttattggataaatgcttaaagatcattgaccctaaactgagtaaatttctaacagataatttattgacagcagagatatttggcattccctcaatattgactttgtccgcctgtaataaaccactggatcaggttattaaactatgggatttcatgttcgcttatggatttcatatgaatatccttttcattgtggctcagttagtcataaatagacaggctattatggtttcttcctctcctatgaaccttttacgtgagacaccgtctatcaatgcagatgaaatcatcaccctaggagttggttttctagcaaaactacctgatacgttgtatacaaatttggtagatcatcttacggatgaatcaattacaatgtctaaccatctataaaatacccatatcataatccgtctcgctatagtaactacatagaatggttctttggcagaactgtgacccaggtaacaccagcattgccttttcagcaccaactaaatccctgaacttaataaacaccttcccaatggaagaatgaatgtgactcatatcattacggtagtctgggttaggtaaggggatttggactgactccacttcaccacaactttgaattggcgtgccatacatcatagcttccttgatctcagtgacaaatttttcattcttcaaatccattggatcaacgctattcaatacacatacaaccttactaggctttttctcgtactttttaaccaggtgtgggaagttttcatatgtgattgatttgaaattctgctgcatactgctctggtttggtctgatggtcattggaagcttcttttgatcttctgctttgggttcatataataacgctttaatccatgaagttctctcgtcactcccttttaatttcattagctgtaaccaactgtattcgacttgttcatcaattaaccattgcttagtactttcttcgtcttcacattcggggccaagttttaacaacgaaagcactgatccatgatttatcggttgcacgtttcccgtgtcgttgacacatccattgggacgtgaccagataaactgactgctgatctttgattctaagtacttctggcacgttagtactatggtcacgaggctttctttattaaactccatgactattctgttcttttctattatgctgcttgtaacctcattttttgtgtccagatcgcagtcgacatcacctatgaattctttgattatagccacgaccgatacatgctcttcaaaaccgggaatcattggtgtgacaattagggtcctattcagtctgacatttgtgacattttttaaaatagtctcgtaaggcgggataacgcttctaccagtagcatttccatttataactgcatcctccgatgaccagctcgctgatgggttgggggtttttgtcctatacctttccgcttgagcatgcccaaacctgtttttgttaggttcgaaacgtccacgtgtgttatgagacagatctttcttccactctgtaggtttacgaaagttatggccttctgaatcatctgcttgattgtttttgacctgtaagttggtattccgcgaatgagaggcattacttgcatcagaccatctatttttgttgtcaaacctaccgttgcgcacttcatgccctctgttctgctggaagctgttgtcactgttgaatgccggtttagatattgatgaatcatttctctggaatcgactttgcctttccctgttatcctgtctgggactttttccatatctagaggtatgctgattcactggcggagccggacctcttctcgaatcctgctttctctgattcgcatagtccgcatgcgacggtccacgccttgtatcagttattgagtgattgttgttgcggttagaacgagacggacttggtgacgccctttgaggtcctccgggattttgatgtactgatttcacattattttgtccttttccacctgtaacattaacatcagtatttctggctaccttgtcttctttacgctcatgtggcaacggttctgaatttttctgcccatcgctagtattctccaaagcttttgacgtactctttccagtcacttctgctagaattttactgcgcaaagcagccatataatcctggcctgacattttgactgtttactgctaatgttgacagttgagtcaaattttagaaaggaggacgttcgaaagcccggtatttcaagagaaatgttacatgtttctaatgaaactgatcccagcacattgtaagttgtttgaacttcaaatactttcgatgggaatttcatcctggtgaaaaaatgtcaaaatcacgtgatagattctggtattacgtgtcaaaagttacatcgaattgcatagaaataactactttaactgctgtgataaagacctacctcttttaagacgctcacctttacaatattttataattcatattgaatcaaataccaggcaaaaataaaggagaaggaacagctatgcgaatagtgttttggtttttgttggcaatacagtctctaaccacctgttttgcggcggtcgttggtttagatttcggtacgcactatgtaaaagagatggtggtctctttgaaggccccgttagagatcgtattgaatcctgaatctaagagaaaggatgctagtgcgttagcaattagatcatgggatagtcagaactatttggaaaggttttatggaagttctgcggtagccttggcaactcgattcccatcaacaacatttatgcacttgaaaagtctattggggaaacattatgaggataatctgttctattatcatagggaacatccagggttagagttcgttaatgacgcttctcgtaatgccattgctttcgaaattgacactaacaccactctctctgtggaagaattggtttcaatgaatttgaagcaatatatggaaagagctaaccaattattgaaagaaagtgatgatagtgacaacgttaaatctgtggctatcgctattccagaatacttcagtcaagaacaaagggctgcattgttagatgcaacttatcttgccggaataggacaaacttatctttgcaatgatgctattgcagttgcaattgactatgcttccaagcagaaatcgtttccagcgggtaagccaaattaccatgttatctatgacatgggagcagggtctacaaccgcatcattaatttcaattttacaaccagaaaatatcactttgcccctaagaatagagtttttagggtacggtcatacagaatccttatccggatctgtattatcattggctatagttgatctacttgagaacgacttcttagaatccaatcccaacattagaacagagcaattcgaatctgatgccagtgcaaaagcaaagctagtccaagcggcagagaaagcaaagttggtcctaagtgccaactctgatgcatctatatcgattgaatcattatatcatgatttggacttcaaaactactattactagagcaaagtttgaagaattcgtggcagaattacaatccgttgttatagaaccaattttgtccacgctagaatctccattgaacggtaaagcactgaatgttaaagatttggattctgtgatattaactggtggttctactagggtgcctttcgtcaaaaagcaattggaaaaccatctaggagccagcttaatttctaaaaatgtcaactctgatgaatctgccgtcaatggagcagccattcgtggcgtccaattatccaaggaattcaagacgcgaccaatgaaagtcatagatagaactactcattcttttggattttctattcaaaacactaatatatcaaagcttgtttttgatgcaggctccgaatatccgaaagagatcaatttacaattgccaggtatggaattaaaggatactgttttgaaaattgatctaacagaagacgaaagagttttcaaaactatctttgctgatgtggattctaaattgcaatcttcgagcctatccaattgttcgaccgctgtgacatacaatgtaactctctcgttaaacaccgatcaagtattcgacgtacaaagcgtcgtagcctcttgcctgactcacgaggaggtccccacaggaactgagaaggagcacaaaagaacagtttcagaacacatacaaaaacaccctatccctcatactgtggagttcacatgtgtaaaaccgctctcaaacacggagaagaaggaaaggttcaacaagcttcacaagtgggatcagaaagataaacttcttttggaaagacaacgattactcaatgatttagaagcttcactttacgctgctcgagaattggttgaagatgcgaaagaattagagaccccaccaacatcatacattcaacaattagagaatatgataactcaatacttagagtttgttgatgatccttcttcgctcaggacaaaaaatatcaaaaccatgaagagtaatctagccgagttacagcaaagattagagatttacatggatcgtgataacaaacaactagacgtggaaggatttagagcattatttgacaaaggtgaaaagtatctggaattgttgtcaaaaattcaacaaaaaagtctcagtgaactttcacctttgaacaaaaattttgagagcttgggtcttaatgttagtgaagagtatacgaaagtgaagcctccaaagtcgaagaccgtgccatttgaaattttaaatgggacaatagatctcttgcattctcaattaaagcacatcagggatattattgaagataataattccacgtatgctattgaggatttatttgaacagaaacttgaggtcgattcgttatatgaaaagattgaacttttggtgaaaaaaataagagcagagcataagtaccgtttgaagttgcttcaatccgtttatgatagaagattgactgctcaaaagagagaacaagaaattgccaaagaggctcagcaagctgacggtgaaaataacgattcgattaaaaccatggaagaagagtcgatagaggagcatgaagatgctaattttgaacaagatgaattataatcgtcatttcacattatgtacataaatttgtgtaaagaattaaataaagttctttctaacgtattattcgttgttacccacttgttgttccactttatcaaatgagaatggttcgtatgcgtaaccttcaccttcaaagaacttagacatcgcttcgacccagtgcaaacgcaaggcatgcaacattgcagaagtaccttccataaggaccaagatgcaaacggttaaaacaaaccacataccaaacaataatacaactttggcaacggctaaaggagaacccgaattctgcgggctaaaagcattcgcaatcgtcatagtccataagaccgttgataactgggcatgagccaaagataaagcccataatcttaagtaagaggcagtgtgtgatatgcagttcaaacaaaattcaatcgtatggatcacttgatgaatcataatgtcgccaaaattgaaagaagcatgttcgtgttctttgctataatctgcgaccaccatggtatcctcagaattttcttgcgcttcttgcaaacgctcatgaatttcttgttcatgcatatcagagtatcccttattaatggcctcctggttcagcttctttagtactagcggtttgtacaatagtagccacggtacacaaactaaggcagcaagtaagaggataatctgtagaacactttgtccacggaataaaggctcttcgataacaccaggggaaaggaacatattgattaacatattcaaaagtcccggagcgggcttattatcttttatccagtctttcgaccacttgtatataatagcccatgaaaggtaaccgaaaatggactgcatgaaaattaaaccaggaataaaattgccaacgatatctactctggatttcttaaatctgtagttgaccaaagaaaacatgaatgaataagtcatgtgaatgaaacccattaaaatggataacttcattttatacgagttagaaaataaaagagcattttcagttccatgccaagcgtaatctaaaccgaaaggataaaccccgacctgcgttgcttcaattgtgtcgccttctttgaatccactgggccatttccaacctgacttgaacaaagtcatggaaagtgaaaaaatgtcattgtataaaagaccggtataaatggagaataaacccatcaataacaacacatatctacctgaaaaagccatatcgaaaatctcatctcttttcatctgaccgaatttcttttctctcaaaaccaacaccaatccacaaagtgttaaaatgaatccatgacccaagtcaccaaacattatggcgaacataaaaggaaacgtaacaatggtcgccaaacctggattgacttccttatatgtagcggtaccgtacgcatccacaatattttgaaatgcctctgtgaatttattggttttgtgatacgttggaggacttttattggtagaaataacgttcaatactgctgtactggcagacgcagatacttcaccaaaatcccttaacgagtttcttacggcatccagccgagaagaaggaacccaaccttcagccactaccgcttgagattcttgcctgaacaaatttaatgtagcataaatatacttctctctcttgactaatacattccaaatgggtaattgatcatttacaatcaaaagttctgtgtgcaaagtttgttcggtggtagtgcagatctgttcaagatcagtgattttatcattcaatgcttgaatagtggaatgactggttgagatgggaaataaggttccatttagagattctactaccttccgaactctcttcaataaaacatcaccatgggtgaagacaataaaacaatctttctcgataagttcatctccctctaaaagcttctgttcaataggaatattatgaaagaacaaattacctcttaaaattctccataaaattttattcaaaatagccaccttggccctgctaattgagcccgtcaacataaatttgttatggtaggccaattccatactgtttctcgttggttcgtctgtgtccaaatcaaatgagaaatcacttaattggtcggactgagtttcttgatccgctgaaaggttgaattcctcaacatccatagaagagcgtattcttccacctatattaggatttacttctaaaaatcttccagtttcaaagactacatgtctctcttctatcaatacattgagtcttcgttttaaatgtatcaaggattcgtcaagttgccttactcttgcttcaaattgaacaatatcatcggaaacgtcgtttattgtatctatagtatgatggtttaggctttccaaaatcatcttggtggaagatccaaatgttcccattggatcatccacgtctaccggatgataagtatatttccatgtagcatctttatgacgttcagacactgttataagatactggaccaatctatcaatatcatcgtattttcttatttgattcacatgtcccctttgaaacgcacttacgccagcgttcatgtctttaaacattatagcacccatattgccaaggatacatacgacttctcgagatatttcggatggaatatatagctcaacatacgtcatatcagccgaccgaaagatggcctcttccgcacaatcaagagtcaaatattctgggtttgacatggctcaagtaattagcgtttaccaatctctattccactattcaaaacgagctttaatttaacggaaatgtaaatacttcctttccaatatttcagtaatgagatccctattccaatagacaaaagttctctgcgaaaatgccagactacctgtttcaaattcggaacaagttgttccaatgtaaatgctaataccgttgctatcttcgggttctgcttctaacaattggccgcgttctgtcaacaaaaaggtgtactaaatatgcaagattttggttacgtatagcgattgttctcctaaatttaagaacatgacaaaagaagaaaaagacgggtaagtacaaataaggttacaacacactcggttatagaaagaagccagcttgaagcactgttcatcgaccatcaaggactgaaatatgcaaagtcctagtcatgtcgatttggcgtctccaccaaggatacctggtactccagttcctgtgaagttgaagtcaaaaaatagcacgaagcagctggttaaaacagcgaagtacttgtttccggattacatggggttgttcaatctaggaatattgaaacacgaagagttacagtattgtgagtataccattaatggctttgaattatatattgtggagcaatgggtctcagaaagaaagttttctaatgttatcacttcatttacaggaaattcaagcgaagtagttcgtggtattttggtgaaacttccagaggacataaggtactggccagaatctttcaagcaataccacgacaagctaattgaattttcgtcaatcaaagtgatggatgatggcatttccttatttgtcaccaatttatcctatttcccgtcgactcttaatttattgcatgtgaagaatgggtcaatgaaggattcctggccattatttcaagtaaacttcaatttaaaacgtattggctgtggtagcagatccggaaatttattaggcgagccctctattacatcactagagaaatttgcgcagatttacaagatggccaccaaagatcctgaggatttgtttcgaaatttaattgagttgtttagagtaatacaaatatccttaacgtattttaggttgttagatggaaggtttaaagatggtactctttgtcagcacacctttgatggtatacaggaatggtgggttacgtatggtaaactatacttgggaattgataggccgaaaaatgaaggaattctagggcctaccacagttgcaggtataataagttttgtattgacatgttacttcaagttcattgtggaagattgcatatcattcaaagacccttatatagaaagttccttctactctggggtgtacaactttcaaaagaaacacaatcttccgaagacgtcttatctagatatagaaacgatgaacaaacttttcaaagttacttctagggcaaataccacagatattttcaagttaaagcgtgctttaaaatctagggtacaggatattgctagaaaagtcaatcctatccaactagctaacgaaattttaacaacagatcttgattggttgatagaaaatgtccaaggcggatatcttggactattttggagtggaaagaggcaaaataaaataactttacagagccataacttttatgaacaggattacagtcatggggatccgttcgatgaacacggtgagtattttaccggagaaggaatctatgattatgaggagaatagctcagaattggaagatatatcaagttgggaggatggcaacgtaaagcacgaatctgaatttccttatcattgtcacaataatgtcatgttccaaagggagctatatcgtagagcttccatacctcagaccgagaaggaaaagaatctttttcaaatggaatacaagaacagtgtctcagccgacgagaactcggggcaacagtacacgattaaacataactacagcttctcggatatacaagattccatagaagtgtggagttttccatttcaagtatcgcctgttaaaatcgctagggacatactgcgcatggaggtacatatgagaaaatattgtgatgagcgtaccacagaaagctggaatgactgtatggcaacattaacctcatcattaaaacgttgcacagagacttttgagactctccaacaaaaagagaacgaactgcggtctaagcatgacaccatacaagctgaaatgaaagacataaactcattagaagctaaatttaactatgatttgaggatccttgatgcaagaatgagagacgttgaggaaaatttgaaccattttagcaacagattgaacacattagaagatagcttcaaactgaagggtaagaaatttaaagcattaattgatactgacattctacacagtgctctagagttagacaaatatgcatttgaattcttcgaaaatgagcaagtttggaacgagggtgtctttttgagatcaatgagacagtatatatggcctgtggtgaagaaggaatgggaaagactgagtgaatggtggagcccaacgaatatgtagtgtttttttttgcttgcatcatttcaatgcaattgattccggaacaatctttgtttgatatttatcttcaaaatctccgatcacatttttaagccgtagatagtttaggttatcattcggtaccttatgccatggtactctattgaatagatccgtcaattctcccatcaatatttttaattgcttttcggcattaatgtggccatcatttagttgtttctcgctatacttgagtcgtgacattggtgctgtaacactttttgttatgaattcttgttgtttctgtggcgctgatgttttatattctacgataaagttacgcattgatactatcatctcgtctatttgttggataagcagatatatcttcgagtgaatgtattcttgatgttcgatctggtacattaaccgatagttttcttcgaccagttcttcttccttagttttttgctttaaagtattgacttgtcctagcgtttcatcattaggagatttcgaatattcgttgtaacttatctgattctgcttcgctagcctcttcaatgactgctccactttttctgtctgttgtctcgttgcccaagcctgagagctcaaagtcttcatcaactgaagaaggtactcaaaactgtctccagatccctccatcgtgtacggcagaagttattgtttatggtaatgaagccaataagcaatttatcaatacttttcatcacatgattgttgctaggagctcaagtttccattatttcttgttgttgaattttaaaccttaattttatgtccaatcttataacatcaggacaaggacaatagcgctacaggtgatcatacctaattatctttgagaaagtacactatcttattttcgtttatctaactgcctccctggctcatatattaatgaaaacatcttaaatatactcatgatatgctaaatgaattgtttgatatagcttactagattcattgttccattcaagaatgaagcggtggctcaatggtagagctttcgactccagttaaattctgggaattttccaaggaaacaaaattgcaatcgaagggttgcaggttcaattcctgtccgtttcatttttttagtttttgtttaagatgactgactcaacaaatgcagggaaccacggtctgagtcaaagcgtagtgagagcagacattggtcactgtgtgacgagaacagctccctcaaatagtaaagtaatgcgccttttctttcttcggtggatttgaaaagaatttaacattttcggatctgactattagagttctttaaacagtacttgttgtaaatcagattttgaaccttgattttacacaggagaaatttatgttgaaaatacaagtaaatattgttaactaaactttgctttagagtctacgctgcgtctcttaactaaaaggctggctacaaaatatcgacctctatttaatatgggagaagacggtaaacatcacgcagactactcttcattccaaacaacagacaggaaaaaagctctcgagcaactcttgatttcatatgaggctttagcagaaggtcaagacaactgggtctgcaatctggcgaacgccgcatcattaatctggcattgttacatatcacttaatgttgacgttaactgggctgggttctacctcactcggagagagaataaaaaagagttgattcttgggccatttcaaggcaaagttgcttgtcagttgattcaatttggtaaaggagtgtgtggtactgctgcgtctagtcaacaaactcaattagtaccagatgttgaaaacttcccagggcatatagcatgtgatggggagacaaagagtgaaattgtggttcctatagtccaaaatggcgaaacagtaggtgttatcgatattgactgtttggactacaacgggtttactaagcttgaccaagaatttctagaaaaattggccgcttcagtttcaaagacatgcgtattctaactcattaagtagttacactcgttaattatattctctcaattgatatcacaactcttgaccgtatatgaagttgcctgttattgcatacctaacatagggcatgctgccccaggtccagtggaacagaagttttctagttttcaatgaaaaaaatgatttcgcccaggatcgaactggggacgttctgcgtgttaagcagatgccataaccgactagaccacgaaaccatcttgtgaggtctgtcgtaatatagactgaagacaagccagacgagaggtcatgtgagctagccagcacacggcagagttccaagacgtcagtgactgggcatatggatcctgtggtatccagaagggatggcctagatggatcatagacggtcacgtgatggtcttgagtgcgcgtggaggacggtagctgcagaggacctacaagggcatggaggcaatgagttgccatgacgaagtctgacgaccatccgagtatataagtcgagtataaaaggctgagctatgttgcgacctcttggggaggttggacgcatatactcaacgatctaactaaatagattattatattatattcgttatattgtttgatatcaacgatccctcatcaggcgattaatcaatcaactatcatccaaggcatatcacaacaagatctgagagaactacatgagtatatgttacatcgttaagagtttctgaagaaacgaaataggtctctcttatcagcgccccaaattggaataatgaagtttactggaaatagcttcttcaatgatgaaattacaaacttgaaaacgatgttgcatctactagaataaaactaagataactgtctatgatgcaaaaaaaataagagttaagaattacattcattgtaggctagcgaccaaagtaaatatcttcaacgtaagtagaagtatatgtggagttgattgaataccagttccctatctttgctgaagggtactttgactttttcaaaatagcattcttgttcaaaactttgtagaagtaattaatgtatcgtaattttctttctttttgtttcttaaaattttcaattttcatcttgagagatgagatgagatgagctgaagtgaatagaccacagagataaccagtacttctcaaagttaacggcatcagaagaagctctgaaagtatagagagccagaaaacaataccagaaactatggccagaaagaattcttctttgaatggttctgaatcagcggagcttgttgtaaaaaagagagttctcgaggaatctgaattgtccgattctgaagatgaaagaattgaagttgatggtttaatcgatgaagaggctagcgaaaatgaagctgaggaagctgaagatgacgactctgatgctgaattcaatcgcttattagctgaagaagaaaatggacaggaggaggagtataatacttcagatttttctgaagaaggcgatgctttttccattaccgacaaattgtcaaatgtaaagttaacagtgattccagaaacaagcgatgaaggcattgttcgtaccaagtattcagatggaagaccaagaattcttaagtcagaaattaatcctgtttatgatagtgatgatagtgatgcagaagctaagaacacaattggtaacatcccactatctgcatatgatgaaatgccacatattggttatgacattaatggtaagagaataatgagaccagccaaaggatctgctttagatcaattattggaatctatagaattgccagagggttggacaggtttactagacaaagacagcggtgcctctttgaatttgaccgaagaagaacttgaattaatcaataagttgcaaaataatcaacagacggacgaatctgtgaatccatacgaacctttaatcgactggttcactagacacgaatctgtaatgccagttacggccgtcccagaaccgaaaagacgtttcgttccgtcaaagcacgaagccaagcgtgtgatgaaaatagtcaaagcaatcagagaaggtagaattatcccaccaaagaaactaaaggaattaagagaaaaagaagaacaagacagtcataactacgatctctggggagatgccgaagaaatctctgaacatgttatgaacttgagagccccaaaattgccaccaccaacaaatgaggagtcttacaaccctccggaagagtatcttttgaccccagaggaaattgatgcatgggaaaagatggaaccaagtgaaagagagagaaattttgtgcctcacaaattcgctgcattaagaaaagttccaggttactctgaatctgtcagagaaaggtttgaaagatcattagatttgtatttagcgcctcgtgttcgcaaaaataagttgaacattgatcctgaatctttgatcccagaattgccctctacaaaagatttgagaccatttccaatccgttgctctaccgtttatgtcggtcataaaggaaaaattcgtacaatgtccattgatccaactggattatggttggctactggttccgatgatggcactgtcagagtatgggaaattcttacaggtagagaagtttaccaagtcacaatacttaatgcggaagaaaacaatgatgaccacatagacgttgttgaatggaatcccgacagtactaccggtatccttgcggttactgctggcgaaaacatcttcttgcttgttccaccaattttcggctttgaaattgaaaacacaggtaaatcaaagattgaatacggttttggtttcgatactttcggaaacgtcaaaaagagtaatctcaatgtgaatagcgatgatgaggatgacggtgctgaatcacatgctgtcaagaaacaggttgctcaatggaataaaccaaccgaaaggcaagctgccaatgatatttgtatcgtaataacttgtcgtaaatcagtgaaaaagctttcatggcatagaaaaggtgattactttgtcactgttcaaccagactcaggtaatacatcagttttgattcatcaattatccaagcatttaactcaatcgccattcaaaaaatctaagggtatcattatggatgcaaaattccatccattcaagccacagctcttggtctgttctcaaagatacgtcagaatttatgacctatcgcaacaagtgctaatcaagaaacttctacctggtgctcgttggttatctactattgatattcacccaagaggtgataacttaattgcatcctcgtttgacaagagagtgttgtggcatgatcttgaccttgcaagcactccatataagaccttgagataccatgagaaggctgtaagaagcgtaagtttccacaagaaactaccactgttttgctcagctgcggatgatggtaacatccatgttttccatgccacggtctatgacgatttaatgaagaaccctatgatcgtcccgttgaagaaactaaccggccacaagattgtgaatagtttaggtgttctagatactatatggcatccacgtgaagcttggctattctctgcaggtgccgacaaaaccgctcgtttgtggactacctgatagaaccctcatgacgggatatttgtaaaacactgtatactatggacatcattacctatcaatattacaagtagatactttctaattagtgttcaagggaatacattattatctttggatcagagctcaaaaggtatccatgtctctcatcattgccatttcctcatctgatgcgatatcattaccgttatttgttgtgctggcaacggtcgtaattttactcaattcgtctaactcttcagcgttaggcagagcgtagccattttgtgtatgttgccgtatgtttgtatcagtggtggacaacatttcattcgtgtgccgctggtgatgcgaagaatatagaacatcatcatcatcatcatcatcatcatcatcgtcatagttgccgtcattattctgatttttgtctttgtctaggctgataattttggtggcttcataaccatactgtgcatttccgcggtcagtcgctgaggtagattcatccgttacaaataagctatttcgtccctgatgagcaggtagtacgcctgtgtcgtgcatttgcatatcaggtacgttgggaatgtcatctccgaggaggatacccatgtctttcctaactaaattcattctatactctcttagctctttgtcagttttccccaatgattcacataatgaggtgaaatctttgaactttgccttcggatacaaattatgagcccatagctgatagaattgtaagaagtttgttaagttatcgtaagctgtcttgtgcttgctgattctacaacttttcggagcatgttccatgacatacggcagacccttagtggacaataacttctcggcagtaagctttacccttggtttccgggtgttggtagatatgagcgtgggatcttgaccatcagttgtacttgtcatagaaggatccaggccattcacagtaggatccaattcaaaatcaagcctcatgttcccatcttcagtcgcgttgccttgaaatgccgagagatcgttcatatcatcatctatagacatcgtttacggtactgtctcaaaaaagcaaagagcacacacacttgtagatataaaaaatactattccgtgccaaatatgaggacttcgacaactgagagcgagagacactatttatgttatcttaaatcgataatgctcttcgacttcagttaagtttggcgtagtatatttcacggaaaggaaaagaaataaagtcacgtgaacaatatttacattttcttttggttcgtctggtgacattatcagcgtcaagaatctcaacgcagacatttattgcgacagacacagtgacgcgtcgaaaagtcaagagaaggcattcagggggaatgccaagagacaacaaaacgggcaagcaaaaagaagcaccgtgaaattttaagtcaaggctgtccttctgataagcaagatagcaagccaaacactatgttttggctgcgttgataagaagacaaatgctgtcaatcacgtgataatccctcttttttaagttttcttgggggcattcattaggcgcatgtcacatgctctgttgaggaatgagtggaaagccacactttttattgcggtactttcacttaggctgatgaaaagatcggtgtttgaagttcctgctgagaggttattgtgaaagtgtcaaatgataacgcacattaacgggctgccttttgattcctttgcccacagaagtggtccattttgtttcagagatttaaccacaatttgttagtgtgttattgttatcttgttgtagtatattttatggaggttatatatatataaggaataacctttcagttgttgacaaggcctatgtaatagattcgaggttgtctgtatcttgtattgataagttaaaaagtgtaagaaagacgtctcataataaggagtaacacaggataccgacctccgaataggcttaacaagcgcctactacaatatacccattagcgtccccgtttgacaatattcaacaatgttcacagacaattttggaaaagccaaagatacgcagcaggtttcccaggtgatagtacaatgcttcaaaagtttaaattcagttcccagatcgactccagacctagagcaagactattgtgattctgatgaagaggaagatttgatcgtggatttaacgacagggtcgttaaagcccaggaatttgaagaattatctacttatgaatgaggtaatgaatggcctagagagcctatgacgctatggtattaaagccaataagggggtttcacatctactttattgtgtctaccgaagatttgcataccagagagatgcatcttttaatgcctttactgcctggctttatctctcattttattttcatttctttcgactatatagaacatatatactttttgggtaatttaacagacggaattcattatatataacatattggaattaagtgtttcaaacagggagccaactcagaattgcattagcagctgttcccttgtgctcaagtaattactgctacatcacaatcccccaaaactacgtatcactacgtacgctatgtcacttaatacgattttaggtcatccctcacctctgaaaatttctttatccttgaagtaaacaactaattgatgataaagaactaacgttttctaagttgatgcaagcaatgtttcggcttatatgatttgtcgtatttgtctttcagtcatactatcagcaactgagaccaataaaagtattcatacagtgcgtaaagtgggaaatttttttatagatcgttaattgattagtgtgtttcttctttcacaatcagagaacaaggacactcactcatctttaaattatttctcagaaaaataccattgaaccaaaacgctacgactttggtattatctacttagagattacttgtgtcattgaaggacatattattttattcctagtcagctttttcatcaattgtcacctcacttgatttcctgacccactgatgtttggtgcttctcgaccggcatttggacagacgagtacttctccttttggccaacaaactcagtcaacaaccaatgcgttcggtcaacagcatagtggaaccacaaacaatctgtttggatccagctctgccaacaacgcgcaatcagggtttggtgggtttggtaccggcggcgctaatacaaaccctacgcaaactataaattccccattcggtatgtcacaacagcaaaatacaactacttctccgtttggcggggcagcagcaggagcagcagcaggtaattcattgtcgaacccaccatccctgtttggtggtagccaatctagtggtacagcgacaggcgttctctcttctggacctccttctggcactggaatcaagccattccaaccttatacggaaaaggatgtgtcaactggatatccatcggtgtttcaatctattacttgtatgcctgaatatagcctttattcgtttgaagagttgaggttccaagattatcaacaaaataggaaatttagcaccactgctggaggtccgacagcttctgctattgcttcgccattcggtcaacaacagacaaatggtactaacaacacttttggtttaggaaataaaaataccatcagtgcaggtggcgcaactccctttggtcaacagcctgcaaattcaccttttggccagcaacagcctgtaaatgcattttcacaacctaataacactccctttggccaaccacagcagcaacagcaaactggcatgtttggacaacagcagaataattctccattcgggcaaaatactgcttcaagttcttctccattcggtttaaacaaaccggctacctctggaggtctgtttggacaaaacaccaccaataataattccgcatttggtcaagccaacaactcattatttggtcaacaaaaccaacagcaaaacccaggtaacgcatttggtcaaaatactggttcaaacacctttgggagcactttcggccaaacaaacaccaacaatcaaccgggtggtttgtttggacaaaataacaccacagcggccaatactggtggactttttggtcaacaaagtaacgccaataacgcatttggtcagaataataacacctcaggtggattatttggatcaaaaccaggtggaactacaggtggcggtttattcggtcagcaagcacagaacggaccctctcctttcggtcaacaaaatgctgctaattctactccattcggtcaggtaaacaatactcaggcgggtggattgtttggacaaaacaacaccaatactggcggaggtttatttggacagcaacaaccatctaacacaaacagtacaggattattcggacaacaaagtaacgcagctagcactggcggtcctttcggacaacaaaatagcaactccatgaatcaacagggcggaggattatttggtgcgaagccaactaccggtggcctgtttggatcaaacaaccaaagtcaacaaggttcaactgggttattcggagctcaaaataaaactgtaatgggtggtagttccgcgctgtttggtcaaaataatcagcaacaacaatctggcggattgttcggacaaagtaatcaaccgtctgcaacgggggggttatttggtaatcagaaccaacaaacacagcaacctaacaccggtggtttatttggtcagcagaacaacagtatggcaaacaacaccggaggattgtttggtgcaaaaccaacaggaactactggtggattatttggccaaagtagtcagcagcagaatacatctagcggattgtttggtcaaaataacaaccagaacaacacagcaacggggggtctatttggtcaaaacaaccagcaacaaggtcaatcatcgggtagtctctttggtgccaaaccttccggcactaacgctttaggagctaccaacggcgggttattcggaggcaacacacaacagcagaatacggctactggtggtctatttggtgccaaaccagctgatagtgcgtcaacatctggtggccttttcggcactaaaccaacaggtggtttgagtagtaccactggaggtggattattcggtggaaaacctgccggaactgcaccttttggcgcaacaaacacgaacaatgcctcatcaattggtggcggaagtttattttctgcgaataagccagcaaatactggttcgacaggattatttggatcacaaaacaacacttctggtaatgcaaatacaggtggtttattctcttcatcttccttgcaacaaaaccaacaaatgcaaaaccagcagcaagcagcacaagcgaactccaatccatatggtacggatgagctattctcccgtgttatctctattcctaattccattactcaaccaactaagcctagtgccacaatggtttctgcagacttgaagaaaaagaactccctctccgcagcatacaagctgcttccaaaacccttgtttgactctaaaaagtcggaaccgaactccagaaaggttaaaattcatctaaaactatcaaaacccaaggaggaagacactagttcgactgctctaacaagaaagcctatggattcttcaattttcactgcatctactgatgaggctattttaactaccggagaactcctctttaatccagacaaaaagtctttcaaaaaccttatcatcaatcgccaaaagatggaagaagatgatacctcatctggtgaattgaaattcataatcttcaatactgacgacggaccacaaaagaaaatggaacagaaagagaataatgatatttttagcaaaatccaagaaacacctgtttccaagcatcctgatctttctcccgagagagaaacttccatcattatcgatacggataaaaaacgtaaagttttccataaaagcaagttagtggaggatgacatttcatttactgaaaatggttattacatatccccctcctttgaaaccctagaatctctaactttaatggacgctcgcaaggtcgaaaaccttgttattggtcatgatgattatggaaagattgaatttttgaagccagtagatttatctttaattccactaccttcgctatgtggtaaacttgtaatcttcgaaaatagatgttgcaccgtctcgtatattggtgataaaccagaaaaaggtcaaggtttgaatctccctgcaaaaatcacattggttggttgttaccctaaagataaatcctccggaaagccaatcaaagatccgactcatccgatattgaaaaaacatatagagaatttgaaatcaatgaaagaggcccaatttgaatcctatgatcctgaaacaggttcctggtgctttgttactgaagaacctgttgtatgaatagcacacttcaatcttgtagattacatcatcatattacatcttatatatatatatatatatactagttttaggctgcagttgaaaaaatattttcgaaagaatcacaataacacatggaaattgcattgtcacggtggaatatgtgaatggatattaggtgaggtataatgcggtgttgatattaagatcaacatactaattcttctgaagatcaatacaaaacaataaaaataatagatgccacctccaggaatcgaacctgggtttcatcggccacaacgatgtgtaataacccctatactaagatggcgcaggatacaagatttgttgtgatatgctttggatgatactgattgattaattgttgaaacggatcataaactatgatcgggtaactaccaatgtaataggcggttaagtaccaagatgatacgtaaggattgtttctagttgatacatcatcaaccaatctgagttattatataaggaggcattggatctgtacaatgacgatcaacacagtcatgccagatcaccaggtgcatcaacatacattactagatatatagctaataaacactatggattcatcagataccaaagatcttgaaataacaacacgtgactggaaataccagtatcaacaacattaatcgcctgatgagggatcgtagagaccaaacaagtactgaatttgatataagaatatacatagttagatccttgagcatatgcgtcttgctccttcttgttgcatccaacctctcaaaaggttgcaacttaactcagccctaatactcaactcatactcagttgtccgtcggactttttcatggtaactgatagtctcatgagccactcgtcatgcgcagcttctgcctattccaatttcactaaatattgtcacgtgaccctctttgatccatctaggccttcccttctggataccacaggatccatatgcccagtcactgacgtcttggaactctgccgagcgttggatagctcacatgacctacaggatgcctggcttaagcctatcttacgacacaaaccataagaatcttacaccaaatgcagtgacacaatttcacgaggtggatactgccccgcctcctcgtggcacctcgcctcccctcaggaatcaagccgtcatgtgttgaatagccatgaacccatatctcaagaagacgccatggtaaattccattatgaaatatgtttattgagtgagtcttcgataaaaccatacttgtgtttccttttgagtaaagtaagtgcaatatatcttgagtcgacgtaacgcagaagaatatgtattgatggagatgactccagtgaatgtccctctcatttaaacgtctttctgatacgtttatcagtcatctgttgagtgacctccagaagagaattgaaagtagttcattatttttttttacatattctccttaccacgctgcagtgcataaccactatattatggagaagagcacaaccaaggccacccgaaatataaacagtcaaatatgctaaaagcttaattaatcaagtcggaaagcgtggctgatatacaagctacgttgttaaaactctttaaaatgaagaccactacccagctgcagtgacttggggtgactctggattgggctcatttttatcaggctctggtttgattatctgtgcatctgaagaccatgatgaagtatcaaattggaatggatgatcaaaaatttcttcgtatgcttccaaaaacttacccaaaacatttgattcttgaagagcttgctttttcaaattgagaagaacccgatagtttaataggaactctggatttgataaaaacattgtccataattcgttatgctttcctttcaaagagagacacatggctagttcatccgaaattaaatgaattaagtctggatcatcgtttttatccaaaatatattctataagcattttgttagcagcagacaatctgtctttcaactctaatttcaaatcattatggatctcaagattttttttggtaattagctttgtcgcaaaaggtgggtgggaatctaattctaagtcctggggccctaaccccacaatcttccaatcgacatcatcttcgtaatgatatataactggcttagtttttgcttttggtaggacagctttagtactttttttcgttgcagctttggccttacctttggttgtgacctttgaccttgactttggtactgaggggctttcttcatccaggtcttccgagatgtcactctcatcaataatatctgtgtctctatgtttatccttatttttatcatcatctgttgttttcgtattagatcttgttgaccttcttggggctggtttcggcttctttgccttcgtcctagaactgcttcgagttggtctcctcttcgaacttccctcagagtcaacattttccacgtaatcatcttcgtcttcgtcattttcgccttctgtgtagtcatcatcatctggtttcccactggatccatactccacaaactcccacacgtcaataccggtagtcaaaccttgtttagccatttcataggcatggaccaaatttttcgaagtcttactgttaactttagataagaaagcctcgatctgtggtagtgtcaactcatgcaaattacgtgggtttaaccaaatgtaggaatcatcatgaaaaaacttcacgcaataattggttaactcacgagtaaatttcttaaaagtaagcacaggtgaatattcaatattctcagcactatctgaatcttggtctgattcatctggaagcttggatctatttttcgtaagaatttgctgaggtattatctcaaacggtataaccatcgctggccatggtggataaccttttacttttgcaattacaatatccgtaggttgcaacatttttgacaccattatgaaatgcacagttttcgctattgaagtatacctagcagatacttgaaacaccaagggttgaatacctagatattccacaatccttaaagaaatcgcatttcacagtagcagttaagtaacctgaaatttacgatttcgtgtttaaaaatcattgaaaataaagcttctaaggcaaaaacattatatcacatgcaaatagccaagcaataatgaaccttaccatccaagactgattatttgctacgctaaccataagaatagtaaaccttaatttataactgaaataagttttagtatacaccagcgaagaaaagaaaatgtacaaatacatatatatatatagaactgtcacaaacgataattcttctcggagaaaacctacaaacgataggagaaaagggtccagaggaaacgggttatttattaagaaaataggaagagagaagaattaggcatagagataatgatatagtaaaaggaaagcttgtccttcaaagtcttatatcatttctgagagtccatagaatgtaaaaaaaaattaataaaaggaaaaggaaaagggttaaaaagtcaagtggtatgagagtttttcatcagttgcgcttggataattaaaatttgtacagcctctgatagccaggaaatgtgtaagagtcacagatctctgacatgtcgtatcggtagtaattgaattaaacttaaagtcaatttgtattgtatcctatttctatttcatttgagtttagtttagtttcgtctccgccctgcacgcttctttgatctttcaattcaaccagagaatcgggagatcgacggccgatctacaattcgaacattttcgatgacaagtcatcaaggaaagagaaggtggatacagatatcttgaacagttgtttctagtgccactgaaccagtcaatttgagaataataagatccaggaaggaaagtagtagaaaaaaaggatgtaaaaaaacagttagctcacaacacgtagacaggcataaattaactgataacaacaacgaaaatataacagaacaaaagtttgcttcaaagtagttaattagattcatatggttttcagctcttttcatgtctttctgtgccatttctttgaagtggtcagtgtttcacagaattccagttaagaaatcccttaagttcaaaactggccatgttgagagttaacgccgttgaagtattgttcgtaggcggcagcatggtctgggtttaaataagaagcattagtgaaattcggagtttggcccgtgccttgaacctgaggttgctggtgctgtacggattggggttgttgttgctgttgtgaattttggccctgctgttggagcgccaaacgttgttgctgttgctgttgttgctgttgttgctgctgctgctgctgctgttgttgttgctggggcagaaggccgtgggaatgtccaccacctggcaattggaccgaggtaggtactgtggagtgtggctgaccaccaacatcgccgccatgatcgtgttgcacgttatgttcatcatcttcatcttcatcttcctcctcatcgtcatcatcctcatcgtcttcctctggtgcattcaaacacgcttgaattaaattcttgccctcaggttgtgtaacaatgggttggaactttggtgtagtgaacgtataaactagaccggtttcagaaacaaccaaaagaagaacctgagtacctgttaacacagataactcatatgccttcttcataataccatgtttccgcttcgaaaaggtgatatgacgcctggtcttatcctgaatgaatttgatctcaatttttctcctttccttggtttctttcgtgacactgtcgtctttaacttctgaatccgacatcacgggcacttgcagctgattttttttttgtttcggtactttctaaatgagaaacactgtttatacctgttttgttatttccacagtctgattattctataattgagagaaaaaatatatcaacagtacaagtactagtgcgacctgggaatggtaagtggaagtatctaattaacttaatgaggttactaaataacaaaaacttttcaatgctgtgcacttccctaaacagtaaaacacctgtgtaaactatcaggcaaaaacaccaactctatattctttgttctttattctataattctttattcttgcgagaaaaaaaaacgcacacatatacagactaagcgagataaacagtagaagtcagtatttttaagcagcgaaaaatataaaaaaattatggagctaactgtaaataaagagagggagagagatattatgctcaaacacaaggacacattttcttatgaccagtggattatctggaggtaaagtttagttggctctcaaatgtactatggtgatgatgtactatgtatcaaagtttcgtcaactgcagaagttggtttttttctcttcaaggagattctgagtataatgttaccgtagatatagatgtagatgacacctttttcttaggtacagcaggatactagggattccttttgttgacaaggtgttaattgcatcccgccgctataggacacatctacgacgatcaacgatatatgtggcgagtgtttaggcacttacttatccttattatattcttctgttgccttaccattcatagcattgtcaatatccggacgtagtgttttgagaactggccggacctccttttcgactgtgtgtcgtgtagaattactcaaaagaggcataatatgagataagggagtgattagtgaagagcagagaccaaaatgtcacagtgtacgttacacgtgacaccaggcgcctcataaaagttacccggatatcgtccaattcagtacagagtaaaacgacgcgtgtggtgtgtgggtgatggtacatggggttatggtggtgccaccaataccacgactattgcttatctaagcataaaaatcagcagagattttcgctgttctataataagccataggaaggaacattaggagaaatagggacaccgtagatgatattggggtttggaattatcgggaaatatgtacagaaaacaggaaagtgtttctattactttccgtatgcgggtgattgtcatactttctggagtccccagccggtaccacattttgattgttatctcacaccattggaagaggatatacttccacaagataaacagtggaaatcagagaatagctgaaaatatggtgagatttccatttcaattggtatgatttgaattcaatctatacttggaataccggcaaataataattatacgctgataccccagggacgtgcaaagtatcatcacttttcagatgcaactccaaaaggaatgactatataaagactgattatatatgccgttaaattcttcttgaaaccttagcgctttcccttcttttgtacctgttaatcgtatatcctaatttcccttcaaaactgtcccaagctacaatcaggacaacaaactgtttactgtcgcatcacttcacacaggacaaataataatcaatatactacaatgaacccaactttagttagagctttccacagatccgccgtcagactatcccaagcttctgcggacgcttcttcacacagtatgtctaccggaaagtggtttgctaccctaggaggtgtcactgtactacttggtgctggtgctggtgccttgcaatgggcctacaaagattcaaaaattgaccaaatctttgccaaggaaagaagacagggtctacaccattgaagcaaaaattgaccaaaagcttgctgaacgtcggactcgtgcggttaaatactgagatttttatatattcttcaattttgtactaatttaatgaacggttattaaacataccctacccaggtagcgccagttttatttttttttatttattctgtcgttactttgttcttcgttatggaaaactgacgcacctgtcggtttaatctttttttttttttatgattggtacttttacattgctttggttctattttttgatcttcgatactttttttttaaggtactatttaagaacacagttacatattcgacaaactttaatcagtcaaagcaacggtaaaattaggattcttttcagtggttggttgtctcatcgaatatttgaattataattggaggtaccaaattgtaatcagaaactttaaaatgtcaatctatttctctgtgttgttcatacttcttgtggcccaaatggctttcatgttcatgatagttatgcccttgcattatcagataaggaaaagattagtggttttctctgataattttttatcaggtcctcaatttagaactgtggtggctatattaagttgtttagtgatgctactgttcattgactcatggaaacgtgcacagctcccagtgttctctcacgcagagaaaccacaagatgtggctagttcgttgaagacattgactacaagggcttacaatcaaagaaacgtatacatttcggggttcattctatactttactatttgtattcctgtcttattgaacttattaacccgtttggtaaaatacgagactctaattagggaactgaactctgtacctgcagttgaaaacaagcaagatgagaaggataagaacaaagccaaggagaaagaagtcgcatctccccaattaaccgcactacaaaaggagttggaatcaaagaaagtatctttgaaggcgttaaagattcaaataaacaatctaaacgaacacttcgatgccactattaaggataaggatcctcagccagcctcagagaagaaaaacgattgatatgaaacaatgtacgaacttttacttaactataaagcacgaaacaaaaaaatccattattaacgaccacgaataccggattcccatgtcgaattcatcaattctttgaaaatgctttcttggacatgtgtcactaattgattctcttctgtagttaacccatcattatctataacctctttataatttcttaaggcatgttctacttcaacgacgttactgcatcccagaactgtaggtccgcggttcaaccattggaagatggcatactttgttgccaggtcagcaatttcaacgccctctttcaacaggtacttggcggcctcactactcctatgacgtagttcctgtgagcatggatggaaagacttagtttcaccactggtcaatagagacattgaaaggatggatccgttggcaacggttttcacttgacattcttcgatgaatttatcgtaatactgctctagtataagattttgtaagttgaggttacaatacgataaaatgttgtccaatgaaccaatgcgtttgatatccttacatttcttagcaatttgatataagaaatcgacagggtacccactgataccaattctcaagacgattccttcatctttcaactttctcatttcagtgagagcctccaagatcatatcctcttcgacaaactcaatgtcatgtagatataacacatccaagtaatttgtcttcaacctttcacatgatctcaaaacactgcttctcacatgctccttcgagtaatcaaagtcatcaagttgaattctaccaactttggtgcatatttggtacgagttccttggccattgttcctgaatagattccaacgcttcaccatatattatctcactgggaccatagtatggtgatgtatcaatagcgttgattccattagcgaaggcgaactttagcatatcaacaacgggaatcgagtatggattatcattgtattgagtatttaaagttgctcctcctaaaaccagctgtggtaatccaccgaacctctcaacctgcttaacgaccatctttaatttcacgggtatgacaggtcgatgctaaagtataaattgtatctatatataggtctgacctacttcaatgttatcaattaccaggcgcatgccagttaaattcgatttctattcgaaacctgcagttcgctcaaccacagttttacctttttctcagatttctttcttttcttgaatgtcaacatgggataaaacgaaaactggttagaagtattatcatcagaacaaacaacacacaaaagttttcatgagtgatggaacgaatgaacggtattagataaaaattaatatttgagagtgttcggtggattgttacttatgtgagtgtatatctattttgtatttctatagagaccagtttgtttttatctcagttgagcagtttagaaattactattggaggcaaagatttgagctagagcaatcacaagactcaaaagttcttccaacagcagcaaacagtttctattgtgattagcataatcagcagacaaagttgtgtattcaagagatagtagtggtaaaatttactaggagaaacattgcccagcatgccattcaaaagaagaattgacagtatcatgagcaatgatcgaggctttgaacttggtaagaacaagagagtaacgattcgtcgtttcaaaaatatcaatttgattgatattcgtgagtactatctggaccaatcgtctggagacatgagacctggtaagaaaggtatatcgctaacggaggagcagtacgatcaattgattaggcacagaagtgaaatcgagaactgtttgattgatttagggtcttctagatccttaacggatagaccagagatggattcgttacttgagaagaagcagaagaaggacaagctcaagaaggagaaggagaaggagaaggaaaaggaaagggaaaagctgaagaaagaaaaggagctgcaaagagaaaaggaggatcgagctaatactatgggtggaattgtcgtacccacaaacgtgaacgctgtgaaagaagaacaacaggacgatgcatctgatgacgcaaacatcaaagatgaagatgaggcacagttcgagacagtgaacaccgattctatagccactacgacaagagcttccacctctgccagcagcaatccaagactggatgatcatctggggaaactgcctcgttcagcacctgctgtagaagaagaagatggcgataatactatggaaagcgatctggccaaggcattgtcacaggaccctcaaaacggtcactcagatgaagatatctccgaagctgattagattaaatcagacgagattccgaaagtgctttcctctttttttaccattcttaagcctacgatctttacataaatatataccactaagtatatgcacacttgcttaatttcttatttacttgtttggcagtctacacgtttagaaggttgatgctattgtcatcagttacccggacgaagctcctcttctagatcgaaagcggaaagctatagcaaagaaaagaaaaatatatcaaacctaaatcaaactgtttatttctgaaagatcaaactacctgataatttcatttcagataatatgaattaaatggaaaggaaagtcaatggcatagaacgtttctgtttgagtgtgtatctatcaatattccaattttgatttatcaggcatgctagcaagagtgtaaggagaaggattttacactagcacgctcttttcggtttaattgtgagagttaacgtttgattttccatttatatcaagaaattcaaggacccttaaaacacaccactctcattttagtagattgataacggcgtgatgccagataaaaaggatcaggtgcccttactaggctctccggagacgaaagctaagcggaccaggagacgttccgtgtttcagaatgcagatgtacagtctccttaccgggtgaaagtcgataaatccgattcgatgggattgttacacgatacagatgacgacgaggatgagacagaagaaaacgtctttcaaacgtcaaattcaagaaagtctcatggttcttatgagtcccagttttcaggatcatacatcgatcataggccatctcttgccgttttggatcaatcatcgtcttctatgaaaaagaagccctcaagaccttcttttagtgatccgttcaatcaaggatctgcaagcagaaaaacccaatcgacctccaaagttatatcatctcagggttcgggagcaagaaggagaccttctaatattgggcctcattccacgccactcaatagatcaacctcggcagggaactatggctcgttgaataatcgaaatgatgtggttatcgatatggatgcgttaatggagcatgttaataggaaaaacagatcaccttcaagtttaacttcaagaccaagctctgtatcgaagggttcgtctgaagacgagtacaattcacagccttcttctcgaggaacaagcgattcgagttctttggatgacgtttgtctaccaatagatgacgaaacagaagaaggttctaaagtttggcctgatgtgtcggttttggaagaattttcacaagaagagatagaaagattaagaagagaagcgataagggatacggagaattttcatttccagtatgatgaggacgattttgaccatgattactcggatgaggaaaggttggtctcatttggagctcaaaatactggcaacttagattcacaacagggtcaagccaacggtctaacttttacgaggccaataataaccaatattgacgtcccagagctaggaaatactagggtcaacgagacagaacatttgaagaatgggaggctaagaccaaagaagttgacaccatggcatttaaagcggggtaatcttaacctacctgggctttctagtgctgcaatctcgaaccaagcccccggtaacgctaaacagccacatggatcaaattccaaggctgcatctgttaggtcaaattcaaagtttagtgaaagcaggccttttacggattctagaagaaatgatctccttgttggaaggaatattcagtatcccccacacattatatcaaataatccagaaattttcaggttcacatactttagagaagacttggattcaactattcactctcctacaatttcgggattgttgcaacccggtcaaaaatttgacgaattgttcgttggatcagtttatggccatcaagcaatgtcctctaatgctgatacaagagaggtcactccaggagcaggcatcagtacaggtgttgcgaatcttacaagctcaactttacccccaaaaaactctgctccatcgactttggactttgatgatgtgagtccattttggcttgatgttcttaaccccacggaagaagaaatgaaggttttgagtaaagctttcggtattcatcctttgactactgaagatatcttcttaggtgaggttcgtgaaaaggttgagctctttaaagattattatttggtttgttttagaagttttgatattgtcgctgaaagacacatcaggaggaagaaacaacaacagcaacaaaaacaatcagattccgaatccagtgactctgatgatggatccccacaaggcggttggattaaaaatttgttcaagagaaaacgcaggtcgtctgcgtgcaaaacgatcagctcttccaactctagtgttaagagaaaggcgagaaaggagaaagaagaaattgaaaagtataagcggaaatctggtgatcgtcgaaagcctcgtgcaggtgaattagaaccactaaatgtgtatattctagtgtttcggactggagtgctcactttccattttgctccaacgcctcatcccatcaacgttagaagaagagcaagattgttaaaagattatttgaatgttacagcagattggattgcgtacgctttaatcgatgatatcaccgatgcttttgcacctatgatcgagctcatagaggatgaagtgtatgatatcgaagatgccatattaaacatgcatcacaccactgattcaagtgactcggattcaggatcggattcagaatctgactcggatgacgatgataatagcctgtatcattttgatagagcttcgaaaaataccacattctcgagactaactaagggcagttcgtcaactgcaagtacaagatcctcctcctcatcttcttcaacgttgaatgccaagaacattattggttggaagaagaagggtgatatgttaagaagaataggggaatgccgcaagaaagtcatgggtatagttcgtctattaggatccaaagctgatgtgatcaaaggtttcgccaaaagatgtaatgaacaatgggaagttgcacccaggtcagagatcgggatgtatttgggtgatattcaagatcatatcattacaatggtatcttctctaaatcactacgaaaaactcttgagcagatctcattcgaattatttggcccaaatcaacatcgatatgacaaaagtcaacaacgacatgaatgatgtcctaggcaaaatcactatattgggtaccgtcgtgttgcccatgaatatcataacaggtttatggggtatgaacgtgcttgttcctggtcagggaacaaattctttaacgtggtttgtgtcaattgcttccttcatggttgtcgcagcatattttgcatacatatataccaagaaaaggtttggtttctgattatctccgcaacaccggtgacgaacctctgcactgtgattataataatgcctgatttcaatcttgtgtatttaataattacctccaactaaatagttataaaatcaattcatacacagcgaatggaacataaatagttactacaatttaccgtttacgatgactgccttaatctctatttggtgtattgtgtgtttagcatgtctccggatggctaattgtgtaaaaaaaataaaggaaagttcaagaaatttgaattactaagaaacgagcaagacttggattattaagagttagacgataaacgattcacttagaatattataaagtaacataagtgcaaatccaatcagctagaattcaaaaaataaaatgtctggtacagatgagaacgattttgaggccacatatgcagttgaaatgcattgtgagtcgtgtactaacgatatccaaaaatgcttgaaagatgtgaatggaattaagaatgtgacatttgatattaaggataatcttatgaacgtggagggccatgctgccccaagtgcaattatcaatgcgttaaaaaattgcgggcgtgatgggatcataagaggtacaggtaaaccgaatagtgctgctgtgtctatcttgggacaatacacgactggcccttttgaaaatactgtcaagggactagttagaattgtcgaggtagctcagaagaaaacgttcttcgatataaacttgaatggagttgagaagcctggtctgtattacgcctctgtgagagccagtggtgatctgagcgaaggtgtgaaaagcacaggggatccgatctataagttcgaccagcccatagattgtacttcaccaagtgattctatacctaattctttcagtggcagttctttcgtttcagcaccagtccatgtatgggaattaattggaagatcatttgttgttaccaccgatccggagcataatgtgaacaaggataatgatatttcgtttggcggtgtgatagcacgcagtgctggtatttgggaaaatgacaaagaagtatgcgcttgcagtggtaagaccctatggcaagagaggaaggatgctattcaacacaacatcagattctgagcttggtgttcctgacacacgtctctcttttttctcgtctctaagccggtttttgaaaaggcaatcaatatctttatttaatatcagtatggatatatgcgtatgtaagtgtatattgtggcagcagtaagcgagatttagtaatgataatcactccagctcagtatgcccacagatgcacgatgacggaatgcacggaagaaatttctaaatcattagttattcgtcctttttgtaaggagctgcttctttgatttcctgtgctttcttatctatacccttggtaccctgtttgtcagctttaacatcattgccaacgttgtttctcgaattttgcgaatttttagctgctactggagcactatcggatagatcttgtggtgaaactagctcatcattgaacttctctttcttctcttctttattattgctggcaactgaacccacagagccttcagtagagcctgcagcagctccaacagccactccaggagcaaccatatctttgcctgctacggaacctgccacagaacctgctttttctaaaagagcatctgccgcatccatttgagattctaacgcgtccctgttaatcccactcgatccaacggcacgatcaagctcgtattcaacatgttcatcgtctttcccaagccttatcgtttgaactattacgaaaacagtagacagaagcatcaagtagactatgatcttcttcattggcgttgtaagccatccgcccttagacctgccatggccctgtgtattatagcgaggtaacaaatcgttaccgcgacgaattcctccttgcataataataaaataagagtagttcagtaagccctaaacaagttaaatgaaacacgatagcaagaataatgcttcacaatactgattctctatacctggccacgaagtaccaacgaatgaaccgatatttcaaacccattgaacatagtcaacaatatccatagactatcaccataccaaagtacatgattagattcctttgttactttgacaaaaaaaaaaccgttctggatattcgaacgggaaaactgtgacaagaagtccaggccgattaatcatggtttgtttttgccgttcagtatgtggtgtacgaatgtatagagtgtatagtggcacataatcggatacaaaggttgcgtaggcgttgtaaactggactatcaaggttcaaccggtcatgagtccatgtaatctgccctcacaacctacagcgtcgtctttatctatggctttgtgtggcttattttttgttatgtatttacagtactaaatattgggtcgaaattctctgaattctgacttacttcagacaactgattgacttaattaaactatttaaaaatgtgattataaaataagtttttaagtgagagataacccattttgcaaaggcaaataaagggtagaggaagacggatttacttatcaattagcttggtatcattgtgataattacgatactaaataaacaaacgtactgtccggaggaaaaaaaatggctctgggtcggtatgagtctggaaaccgaggctcttatacttcagagaattcattagatataagaaacgattcggtatcgacaaattacggtgataaagttgcaactgagccaacacttggctatacacggaggaacgaaagtacgggcagcacaccgcctgctgttaggaatgttaagagggaaacgctgcaaaacaacatgggaagtacgccgacagaattgaatgacttcttggcaatgctagatgataaaacaacgtattccgaggttgttcagtcggcagaaccacggctggggtttgaggaccggcagaaatcgacggaataccatacggggtctgaattgagcgggaatagtaacggaatagctcttagtgggagtcccgtcgatagctaccctaattctcaaaagatttctaatcatagctcaaggaacaatacactgaactattctcccaatatagaaccctcagtaatgtctgtcggtaccctgtcgccgcaggtggccgatataagctccaggaaaaactctaccgttggtaactcgttaaattcgaactctatacaggagtttttgaaccaaattgatctgagtcattccgaagaacagtatattaatccctacttactcaacaaggagtcctactctacaaacaataatacaaacaatggacataatagctttgaagttacacattccgattcgttgtttatggacagtggtgctgatgctgaagccgaagatcatggagagttgaaccaacttaatgaaaatccgttgctattggacgacgtgacagtatcaccaaaccctacctcagacgatagaagacggatgagtgaggttgtaaacggcaatatagcataccctgcacattcaagaggttctatttctcaccaggtggacttttggaatttgggttcaggtaatcctatttcctctaaccaaaaccaaagtagtaattctcaagttcagcaagataacaattcggagttgtttgacttaatgagtttcaaaaataagggaagacaacatctgcaacagcaactgcaacaacagcaacaacaggctcagctgcaatcacaaatgcaccgccaacagatacaacagcgccagcagcaccagcagcaacagtcacagcaacgccatagtgcgtttaagattgataacgagctcactcaactattgaatgcttataatatgacacaatccaacctgcctagcaacggcagtaacataaacactaacaagttaaggactggttcctttacacaatcgaatgtcaagagaagcaattcatcaaatcaggaagcacataatagagttggtaagcaacgatattcaatgtcacttttggatggtaaccaagatgttatatcgaagctatatggagacatgacgcgcaatggactttcttgggaaaatgctataatatccgatgatgaagaagatccagaagatcatgaagatgctttaaggctcagaagaaaatctgcattgaataggtcaacccaagttgcatcacagaatcctacggaaacttcatcaagtggacgatttatttctccacaattgttgaacaacgatccactactagagactcaaatttccacgagccaaacttcgttaggccttgatagagctggtttgaattttaaactcaatttacccattacaaaccctgaagcccttattggatcaagccaacctgatgtccaaactcttaatgtttactctgaatcaaatgttctccccacaagtgcacagtcgacaaccacgaagaagaaacggtccagcatgtccaaatcaaagggccctaaatctacctctccgatggatgaagaagaaaagcctttcaaatgtgatcaatgtaataagaccttccgccgtagcgaacacttgaaaagacatgtacgttctgttcactcgacggaaagacctttccactgtcagttttgtgataagaagttcagtagaagcgacaatttatcacagcatttaaagacacacaagaagcacggcgatataactgagctacccccaccgagaagagtcacgaattcttcaaacaagcactgaaataatctacgatatttcagatgtgacattggaaatgagatacaatagacatttgataattggaaatgaatcatttcacagttagttatgaattctcaacttttttaatagtcctttatatttttataaggaagttcatttatatacaccccggataatccgatatggtctaatatatgcgctcacatggatcctttaataaaatgtggtgtacacgttcacttatcaccaaatgtcgtctgcatatgtgtattccctttctttggcatatttcttccattgaattttcaaaaagcctgttttcatgtacagaataatcatattcaacgtaaatgctgcatacacatgagaagataaccataaaggatgaagaacagctacaaaacgttatctggctagacaagcaatcaatttgatatgcaactactgtaagaaatatgaagaagtatcccacgatcatacagtttccggagtcaattaggattcaacctatgagtacggacccggaatcatactttcaaattatcgatgagcaacaaaagaaactagaacttggcgttataagcaagacaaagataatagaaaggtacgtttcggcttcagattcagattcagattctcaagaagagcacgcacagaaatttgtgaaccagtaccgcataggagaaagattgggttgtggacagttcggtactgtttacaaaggtcacacaacaggaaaagttgtagctatcaaacagatctataagaaacctatgaattcccccttttctatgagcctaataatgaaaacaatgaagaggtacgaatccatatctggtgatgtacttatcatggaaatgaacgtgagtaaaatacgatgggaatgtttcgttacgagtaaactaaatcaccctaacgtaattcaattattagaatgtttggactctccttattctgaccaaatatggcttatccaacccctcgcagtccttggcgagttacaatggtctagagaaagtaagtttgatctgatagagcaatggaagtcattctaccggggtcaacttgattcagtagaggagttcgcagtgaaagtgttaggagatatatcaaatggtttacagtacttacaaggacaaggcattattcacagagatctaaaaccgcagaacatactattagatccagtatatcatagcttaaggatctcagatttcggatgctcattaatcgtaccgagcaaactcccgttcaaagatggcagactacaggatttatttgaaaaagaactgaataaaatagtgggaacaccactgtttacagctcctgagctttgtaatttcgctgaagggtcagcccatgctagtaatgagcagcctttcaaaattgatgtttggtcgcttggtattacagtgtacgcaattttatacaatgtattaccgttctggggagaaactgagtttgacacatacaatctgatctgtcatcggcagttgaaacctgacgttcataacagttcaaatatttatggatggatacatgaatacgttgttaaccgtatgctatccaaaaatacagcttctaggccaacaacatcaaatattttgcgtacattggaatctcattccaaatctgaactatcatcaatgaataaaatgaagttgaagctaaataaatggaaaaaaaatctactcactaagaataaaaataccgaaattcttcctacacaatccttcaaagaggatttttgttcgcctgccagtagtatcaatgctgcttcgatccctcttacagacaagaaacaaccattgaatcgatcccatagagcgacagttaatttggaaaagtacattaaataggtcaaattcatagattacataacctcacgcactctccggcattcacaaatagataaacccttaactttgacctgctgtacagggaacgcaacgggattcatgctgtccttttctaaccttgaattaatgtctttttcgctaaggtttcattttgtttacaattgaaaaccctactatttacgtttcgcaaaatggcattattaggaaaaaaaagtttctgtttttgtttcactctgtgcggtgataaacctcaagatctggaggttttaaatagaattgatcaaaaagtcaaaaagacattagcgcctgtcgtattcctgtgatcagcgctagtcatcgactggtaaactgaaagaaggctactcattaattttactgattttgtctcaatagaaactatttgcgtagacttttcttcagtccgcttgtgaggttctaatcaccagatttaattaccgacttaaagacccacctttctcaacattgaaccgggcatacccagaagttgaactatcaatatactcctgaacacttaaccgtcccaacaggcatttcatttctcatattattctgtttttcctttttcctttttgcattcaaagatcagaattcaggtttatattcacctcccgctcttaactataaggtacctagttgcctactccatttacgacattaaagtattattcaactcagacttgaagcatatctgcaaagatcattctgcattgtttctcatatatgtttaattgtcagatcgttctatcgtaaagcaatgaataactctttcgagaataaaaagccgacacggctcttcaagcacctacactcaatatggtccatatctcttcgagggaaatctgataaagaagcatatactcaaaagaggtctgttacatcggaatccaaaaggcctatagcctttcaaggcgagatatcctccactgatagaaaaatggtcaagttggcggacttcaaacaacaaacactgattgttagcgaaagcgactcgtcaatatcaatttgccaatcgccattaagtccgatgaatctgagaagagagaactcgctttccctgatgtctccaaatagagacactgaagagtcttccaattatgaaaattctaatgacgagtctgagatcgaatcgcttaatacacatgaaaagtccgataagatgccctatgataatatgatgctcaacaacaacgaatcacaaaacacgcttttatgcgattataatcccaaaatgtcgtcaaaagctgtgcgacagaggagtttcaaaagacgcgatttggcacccactattttaacccaaaaagccaagctcagacgaacacattctatgtttaccagtacgaatgaggtagaaatcagaaatacacgtattccaatttatgactcacgtttagaaatttcaaaactaccaattcactacgaagaacatagcagtgataatctaccgaggataacagtggagactttacttcaaattatgaatgatgattatagcaagttctatcaagaagtctatattgttgactgcaggtttcagtacgagttcctcggtggacacattaaagatgcaattaatatatcgaagcaaaagcaattagaagaagagtttattcataaaagacacatcagatgttgtgacagtgaaaggccgccattaatcgtcttccattgcgagtttagctcctatagaggtcctataatggcatcacatttgagaacctgtgatagaataataaatcatgacaactatccgaaacttcatttccctgacgttgtcgtactagatggtggtttcaaaacattttatgagaaatacccaaataaatgcgagggtcattatgtctgcatggattcaaaaaatcatgaattagaattgagtgagtttaaaagagatagtaagaagctaatgactcgagcaaactcaactcaaatattccagttgaaagacaaaattggaacctgtcctgtaagtttgagcgatgtaaacaacgattataatatcccactccccaacaaagttactacagaagaacatcaactgaccaatgaacaaaacatcgactatgatgaagaggcatcatatttcaatttcagcataaacgtgccgcccaaattgtgcctagacagatatggcgaaggttctcccaacaatggattaaattcatcaaagagtagcagcctaagtacaagtagcaggctattattctcagatgaaatagggactgagtttaaaccaaaatttctggagcacgaagagtctgatttagattcagatggatatagtttccagtttggtgatgacgatactgacgatagaatgagtaacatcactgggaagaaacgattattcccggaattagtcaatgcgaataaataaacaaggtacaacgataaaataagaattgaattgaaatccataatctcatcatttcattatgtgcatgcttaatatggtatatatacataaataacaacaaattctttctctcttcaggtattcggtctttacgtcacgaatgttccatcgtagggaaaactttaatgtcacctcttccttcgctcatgttcagatctgcgctccatctcgaagggggccatactattttgactgctttacctaatgctaagccagtactgatggggccgaaattgttagagtcaactgaatggtatacattatcaccttcgacccatagatgatttctgggaatcagacaggtatccttaggataaggtgatctagttttcacctgatcaaactgtacgcctttaacacgtttacagtatactttctttggattcgaaggggatttgaatagtactacatcattttctttccaattcttggcttgtttgagattaaacttccaaagaagaacccaatcggattcattattgaacgaatcagttggattaagcgtaggtcgcatcgaggagccttcaatcttagctacatagcatacatgttctgtgaaggtgagtataactggaatccacgaaactgtaataaccgcagatcgcagtgcatagcttccataattgaccattttaccaatgagttattacagggacgtacaacgatgaagtcgcaatgcgataaattcttaatgcagccggttggggtagggaattcttcagtttacctcattttttgtcttaggatgcatatcttacagatccatcaaatattgacgtctaattatctgttgattctcgtattcatactgaaatatcccagtaatgcttgagaaaattcaccggaaatataaatcacgtgacatgataggacagtcctttttcgctgatgagagagaaaaatagagcagtggatcaatgcatataaatcaccggttgaatggacaaacgaagacagcatttggcgtaatatttatcggattaatcttgcactgtgaatagagcgattttcagattgccaaggcaccgtaataggaaccacagtaatggattaatagcatcctcttttttttttgatttcgttacaggccgaatgttagcacactaacctcacctggcttccagttgcagttctcaatttcaagataaaaccccacgctacggttcaatgtcttgacagcttccaatcttgttattgtttccgacaaaccaaacctaatgcagcaaacggtatcctagattgtcgttgatttctcgtccacagtccttcaactggttgaaaagttgcggtttagaggaggatgcctgtactatgtagtgtatgggtgaaatgacgaaaaattgaaattaatggaagcccagtcacgtgagtcccggagacattaggtgtttaaatgcgcagagttgtaggtaaggctctcctatcagcgcgaaatgaacgatataaggatgtttgttacaatactttgagaagttatatctcgtttggtcatcaaaaaccgtagctgtgacgccggttgtatctctttgtggatgagtccgagatgctctaatcggttgtcattatgtcctggaaaaacggctgaaaaaaaaaaaccagaaaactagaaggataagaaaagtcattatttgactaggatttattattttacatctatatatatatatatatatatatatatatatatatatgcactgcagaataaggacaatgaacagaacgaacgatcttggcttacggcagcttttagattgtaaatgttagttagtggcacagacaactatcgtttaaggttatacattagcttataatatatgttttcaagatcccaagataaattttgctaacatatcagtattaagctcggactttcaacattgtttactgaactgaaacaaagcagacaacaccagagttttggcatttatttcagaaatagctatgacagaaagtgataacatagcggatagagtttcatctgatagttcgctgtcggttgaaagtgaacaaagaaagaacacatcgccgttcaaacaccgactctccgtcatttataaccataaaatcacacagtatatcatatcacaatggtttttcattgggttagccatatttattgtacttgcgcggttcttccctaattttgctaggagtggtggtcttattagaggtcaatattctatcggttacggtgcagtcatcgtcattttcttacaaagtgggctatccatgtcgaccaaaaaactattagtgaatatgggtaattggcgtgctcacctcgtcgtattggtgatttcatttttagtcacttcctccataatgtacgggctttgctgtgctatcaaagcagcaaatgatgataaaatcgatgactgggtacttatcggtataatagtaacggcaacatgtccgacaaccgtgtcgtcgaatgtggtgatgacgacaaaggctgatggtaatgcattactatgtttatgtgaggtgtttattggtaacgttttgggtgcctttatcactccagcactagttcaaatgtatacctcttctggaccaatggttttcggtaatccagcaacagatacttccgtgcaacagttatatgcaaatgtcatgaaacagatcgggttatctgtctttatcccgttgtttgttggccaagtattacaaaatgttttccccaagcaggtgacgtggttcttgacgacatttaggatgaataaagttggatctttctgtttgctcttgattatgttctcgtctttctcaacagcattctatcaacatgccttcacctctgtctctcacgcttgcatcatctttttgtgcttcttcaatgtcggaatatacttattctttacccttgtatgtttcgtatgtgccagaccgtggtttataataaaaatatttgaccacgaaccaacagaacactcatcgaaaacttatactatttgctataagatcttcaggccattttactatagtaaaagagacgcaattgctgtcatgttatgtggcgccgctaagaccgccgcattaggtgtctctctaatatcctcccaatacggagatgataatccaaaattaggtacattattagtgccattggttttataccaaagtgaacaggttattactgccaatttcatggtccctttcatgaagaaatgggcatcggatgaagatgaacatggtaacaaaatcatcaagcaaccgaccgacgaagaaagtcgaatttctcaaaacaaagaagacgtttctaaagagaacactgaggacgctgactcccgtgactaattttaatatttaagtgttgtccaaatttttttttactcgtttgcttaactcttcctaattgtcaaatataaagcatttcaggtatagcttcttttttttttctcattgtgcatttgatattcatcaactaccgatttcaataatattcaagtaacagttcacacctatgtaataaagtaattattccaattcgttggatacttttttcatgaaagtgaaaatattttactctgttagatattatttcattggacattatacaatttgaaaagaatctatagtctggacgtaaccaatgagcttttgttactttgttcatatcatcagttatcaccactgtaatcaccactattatctccactgccgttctcactgtcatcttcatcatcgaaaatctcttcaacagtgatatcatacgacaaagattcgaaatatttgtggatactctccactttgcttgggtgacatgctacaaatatagaacctcgagcaggatcaaaaatcttaatatacacatctgtcatagcgtttttcaaatcatctgccgttactttctctagtttcttcaagatttcggtgttaaaatcgggccctctctttttgcagaatgtattcaaatatttgtttatggcgacattgaaatagttggattcattacttgcaatcgtgtttatgatgctgctgattgctgctttgattaaaataggttcgaatatcttttctcctccagcgtaatcagtgactatttgcttacctgcttcataacacgcaactgcatccgaagcacggtagacgttaaaacccaccatattagactcgaacatttttgttaagtaagctccgtatgctaaccctgcaccacgaattcccttccagaaaggtccttcaacacattccagatatacagctgccagataaattgctggaaaatctgggtggagataatgtaaatcaccaggaagggcagtgagggcaagcatatatgaagattcggaagctggagttgaaactatgaatgccttttttattggattttttccaacttcagataaactggaggtcagcaatggtgtcagtggaacagtaacagtgacggtgggtatatttttagcctttggagcgaagtaacggctccaaggttcataaatatctcccaacctatcaatatcgccaaatactaagatatgggccttgtgaagttgttcggttaattgagttctcaatgactcaagttttggtaaaattttctggatatagtggccatcctcaatatctgtcaacactgattcaatgattggttcaacgtacaattcatcggcagatttctttaacgatccctcattgtataaatgtctattcatagaagaaaacatcatttgatcaccttcccttttagtttcaacgattgagttgtaaaacttctctaaaagaattgaaaccctgctttcatcaaatacagaatcaaataaaactcttttgagccaattcaccgctttcgagtaatttgtagctttgcattgaatcttgaagtcaattaagttggaaaaatttccaccgatccccatacttatgtcagtttcaacagtttcagtttttaactgagctaccacatcctcgaaagaaatggtttcaccattctcccctatcattggcatggaaaatagttctgttacgacatgataatatggcagtagttcacagtctttaacaaaatcaacatttaatgctacatgtatttcaacaaattgagatggaaagtgctcgaaatgaatgaaaaaagggaaagcttttggtttcaaattaatgatattatcagtcaaagggaaatcactatcattggatggaacaggaatacatgaaatactcttagtttcggtgaaataaacagagtcttgcgggttttcaatttcaaatgatcccaaaacgtcatcaggaatttgaacattgttgttgtgctgagcctgagagaggctttcttttagggcctttcttttagcgtcatcaaataacttcgctctttctttcatcctggagtcattttcattttccagtttttcattgagcttagaactaggtttcccaataacaaccactggttgatttgtaacaaaactttcttcaagcaaagcttgccatttttcctgggaccaagacaacagaatgttgaaatcttccaatgttttcaggctttcttcaagtactcccccatcggtggcaccgtaaaggaaatcggtgatagccatatgcgcaaccatggtgtcaccaattttttcaaatttgaatatgtaatcccatttcatgttttcagtgactagtctgattctatccaaagaaacatggtgggttttcaatagatcaagtgtcttttccttagcttgttgcaatctatctgttggaacacctttcaatgaaatgtttgaaattgtcctgataaaatcatcgctccaatactctgcgtcagtagcatatgggttttcgatctcaatcatttccatgttgaaaggagccagtggagattcagtgagatattccagtaaaatattaacagcctggtcttcaatatgcttcaagtatggttgggtgatccatgaaaaggacacttcgccttgagactcgtcagcttcagggaattcgattgtcttttccttcatctcagttaatgattgcggtatttgagaagccggggtatcaataaaaggtctctttctctcattcgcagtaaattctggaagctgtttatcaaaaatttccatcaattcgatcaattcttctgaaggaatgttaccagtgataatcacacagcaattatctggtgtatacatttgtttatgaaattctctaatttcatcgttcgtcaacacacgtaaatttggtgttaaaccaccagtctcggaccggtatccactaccttctggaaacaatagtctttgtttttctagtgttgtgataaaccatgattgagattcgataccagccatttcactaaacacgacacctttatcagataaatcgtctggatcgatatgatacacctcggtggtacaagcatcttctgtcaaagttggaaagaacaagtgatctaaatacactggtagaagtttcttgaaacctttccagcctgcggttgacaaagtgtaaacggtttgatcggtggcagtccaagcatttgtatttgacatgcataggtttccagcagtatcgagcaaccctttgtatgggtacttctcagatcccatgaaaatcaagtgctctaaggtgtgaggaacaccagaatctgttggacattctgttccaacggcaaagtaaccttgtactaaaggtgacgacttgttatttaagtgaactagttgaagcttggtacgagttgagatgtacttagtgaaatgatactgaggtgcatactcgacttcaaacgataccagtttcttgaaagtcatgattcgtttcaccgccgttagtgagatagaaatttcagctaatggggcccgaagtgattcgcgtagcttaggcgtgtgtttcgttcttttacagtatggttttgttaaatgcaataattaaaagattcaattaatctttaaatgttaacttttgcaatgtgacaagagtcggagacaactactaggaagaaaaacagattacgtgctacgcatgcgacaacagatcaggtattctacgattctacaactattggtgctataaatactactacgagaaattatattaattggaacacactcttcagatatctataccttgtttcttcctttaaaaatcagaagtctaacgtctgaaaaaaggattttaatcatcataagaagcgcgttactaagctttcaaataaatatccataaaacactcttattgaaggccatttcttctgaaatgggccttgtaatatgtatcttgaaaacaaacaatttcctatggaaaggtactgcatcatcacgatatttaagcaatccctacaatactccacagctctatatttctatagcacagcagaaaataactaacgcataaaacctagccgttgcattgaacccccaagacacttgtttccctaacactttaaactctgcaaattgtgagtaaaaaagaatagtgtatgttcaaacaaacttcatttttttcattatttttttcattttttgattactcgagacggtgatgagtttgaaattaattgtcaagttggtgaaaaaattctggcccttagaaacatcgtagataccagtgccattgcgcttgctgtgatcagtggtgcatatcgagaaaagacatcctaagtcacaacggcacatatgcaattctagtagctgagtaaatgtaggatttgcgtgcctaagacatgatgtcttatatttgcaaggtcttcggatcgtatttaaggctttgccttgctgtatattttctgctgtatgcgtggagaataaggtttgtctagaatcaagggaaaatacattcattagtgacgctctagaaataggtatatattgtacatatatagataagctatcagtttgcctatagtttgggaggttcctgagaagagagtatttttacaaccgaagggagaaagacggtaacagatatgactggatcgtacgaattaaaccacactggggaggtggtatcaaatagaggtcttaaggatgcatataatgaggtcactgaaatggaggtagaccctaaaaataatgagtacgctgaggagcaaagcctgaatagagaagatacgtttgatcctgatagtggtgtgaaaagacagttaaaggatagacacatctcattgttggcacttggtggtattatcggtcctggttgtttaattggtgcgggaaatgcactagcaatcggtggtcccttggcacttttgcttggatttgggatcattggaattcttgcgtttatcatgatggaatccattggtgagatgatcactctttatccatctggtggcggattcactactttgaccagaaggttccatagtgatgctctatcggcggtatgcggttacgcatatgcagtagtatttttcgctgtgttggcgaatgagtataacacattatcctcgattatgcagttctggggaccgcaggtccctttgtatggatacattttgatattctgggcggcgttccaagtcttccaattgttgggggtgggtgccttcggtgaaaccgagtattggcttgcttggtttaagattttaggtttattgacgtattatattttttccattgtctatatatcgggaggtgttaagaatcgtccagcatttggctttcagtattggaatgatccaggcgctctttctaatgggtttaaaggtattgctaatgtctttgtcttttgttcaacgttttattcaggtacggagtcggtagcattggcagctacggaatcaaaaaatcctcgcagagcggtaccgattgccatcaggcaaacattttggcgtatcttaatagtttacctcgggatttccatattctatggtgtcaccgttccatataatgacgaaaaccttaactttgccacgaaagttttgaaatctccaattgccatcgccatctcaagagcaggttggccagctggtgttcacttggtaaatgcatttattttaattacttgcatttcggcaattaatggctctttatacattggaagtaggacgttaactcaccttgccaatgaaggtttggcaccaaaattactcgcttggacggaccgtagaggtgtaccgattccagcaataactgttttcaacgcgttgggtttaatttcgttgatgaatgttagcgtcactgccgtggatgcttataactatattgttaacttgtccggtgtaggcgttttcatcgtatggggtatcatttctctcacccatcttcgttttagaaaagcgtggaaattacagggccataccagagatgaactaccgtacaaggccaaacttttcccagtttttccaattgtcagcattattgccaacatattcttgggactggttcaaggatggtcttacttcaaaccattcgatgccaaaaattttgttgatgcgtacatattgatacctgcgggtatcatcttataccttggtgtaagttactggaaaactaaaggcttccttacagcagtcgatctatcagaagttaatttattatttggccaaaggttgccaacaatctcccaggatatgccttcttctacagacagcaccacctcagttgttatcaccaaaacgccacgtaagatcaactggaaggatattttgacctaactcttatgatatgtttccaacaaagaataaaaatcatataattgggacgaaacatggatatgtccatgtaggtaagcagttattaattaactttttctatatcaaccataaatcataatgtcattatatatttatttcgtttcatgctcgtatcatttggcttgttcttcaattattcctctattgataagatcattctttaatgccgaataataatcattcctgtaagctgcgtcgtgagactgtttattccgtatagctgtctctttaagcttctttaggtatttgacttttttctttgaacttttagcaacttcgtgtttatccaattggtctctagaattggattgatacggtaccgacccaagccttctgaatacattcctgtattcagaatattctaaccaacagttccatttgatacctcgcttatcccaaatacatcttttggccaatgcatccagtctggtaattgaatcatgggtcgggatcgttttgatgttgctattcatgattgcacggcatttagcgatccaataattcatcacaacatgccctcccgtatgctctttaagattgataaggagcatctgatatactctgctgaactccgaactatatccctgcctgacaagacatttgaaaagaaggtcataacaatggagagttggttcaacttcaaacgttgctttaaaggtgttcactgtcataatacacatgtccattctgcctttttcggagaactgccttagatactcttcaaggaaaaaaggatctttcacgcgaaaatttaagtgtcttgcatactccataagcttccaggaggcctggaacttgtcccttttgattaatgaccggtggcatatcttgatgatttttgtatcaacaggaatatcattctctcgtaaaaagtctattatgacattgaaaggaatgtcttcctcttctaggattccgtataatagatggtatgttaaaggaactcctctttcaaccattttctctaaaaatatagctcttgatatattatccttcaaaagaaaataacaggtgttccaagttatcacatctgcagatatattctcttttttcatcctttccagataaaatattgcttcgcgatatgggagttgttgtttaattaacctggagttcctgagaaggttccttaacattaaattataagtttggacgtttggtgcgataccttcggatttcatttgtgcataaagctctctgcaggtggcaaaattgttcttgtttccgtagtagtatattacatcgttgaacactgaagccgttttcaatggcgcaattcgtaaattagaaggatgtagcaaattcttaagaagtttcggtattattccgtcttgtaaagatgaccctttgtgatggaatttggtgtgcgtcaaaagtccaatatagtcttcgaactcttgaatatcgcttagtacttcttctgttattttgggaatttcagtgaaacattccctttcaaagaaacgctttttagcgacaagagaaacattatcctcagagacttgaaaaagactagaaataagtttagcaacatcttcactggatatggagaatattctttcgtgtgcgtcttgagttttcaaagttctttttagtgtgttggaaaattgagcggctcgtttatagtcatatttgctaactcgcaacgatgttcgtgcaagatacggtagctgcaatgaattcaaatattcattatgcaccacggttgaagtgttttccaacttagaggcaggttcatttattttagttgtgcttattttggaaggacggtctttatctcgcactctaactgagaaggtaaactgttttggtgatatcttgattccaggctccgaaacagtcgatgttaatggagactttctaagatatgatcctagtaatcgaagcttgtccattatcagctgaaggtgctgaatattgcgttcactcctgtatctgtctgcttttttcaatgaatgctaaatcttggatgaatgctcactgattgagatatctataaatcgaagttttaatgtcgtttttaatttcgtgagaaaaatctattatcagaataacataactgtaaataatagtttccatttcagtaagaataacacattctacatatgttgcattttagtcttgcttttgatatggcaagatacggcaagaataaatactgtgacccatctgtatgactttcgttagaaaaaccgtattaagtacatagtatgtaacaatgactgaagaattactatatagtatatttactctgctattgcaatattggatttgctttcgataaaacactttccaccaatcatggatagtaaaaccggtaaaaagatgagagcgtggagcgatgctacaaagattaacgatgcccacattctgaaataaaacacttgaaaaatttttgattgggttagagctaaaacagagataccaatgatttttgtcatggtaatacccttcaaaacagaacccccaatagttgtcattgcataaataacacgagagtttctgtcctttttaactcctactggaacgatagtaaaagctcgagtaatatgaatgcagaattcaactgctaagcctacacaaattaaaagattaaccaacgacaccgcattcaacctgattccgaaaaagtacatcatagctaaaatgtctacaatgatcatggtgactattccagaaagaatgagagaagtcatcgcagacccaagtagtaaccaggaaacaaagaatatcaacaaaattgaagccgttatcaactttgctgttaacgagacgattgttgaatattgtacaaagaagatgtagaaaggtgagtaagcatacacatccaaatcatttagttcatcaacaattctttgagcatctttgtatgcattgatgtaatcctcttgtgatcttaacggactatgtccagttctgaaggttgaagtaatgatatttgaatcattatagacaattgctgaggaatatggcgatttgcctcccaaaggacaaggatcactcggagcatttatccatatgtcgaagtacttcatgaactcatccccttctgggaatccactcatatcgtaatcccattctccatccttatagcaggtttcacacctacgaggaggaaagtgaggtggacagatttcttcacttcctttcttcaaacggcaacattggtcaagttctggatttaagaacatcatatagtcgtcgtaccaattagctaaaggttcaacaatagaagatcttagcctttctagttctaaaacattacctagggaataatcatcacattcagtaaatttaccacatatcttcttttgtgcagatttaattcttagatcgagattcttcacaacaaaatatacagggggtccaacattcaagtattcatagacatcttggaagtaattgaccaagtacgaattttgcggaactgccatagtttggtccaatccaaacttgatagaaggcagaaatactaaagatatgataaaccaagagaaaaaaactccgagaaccttccttttcttatcgagcaaagataagaatgtcctattaagtaccccttcttcttcattatcgtccgtaagttcttcaacgttggctgcatcataatatttttcgtagaagtgtaggatgcaaacgtaacttgtcaactgtaaaacgacgttaaagcaaagagcgaccgcagcacagattgcaaaattacgcacagctggcatttctaccattgtagctaataaaaagcatccaccttgacatagaaaagaaaacaagatcgacggtgatattttgccgatcgaaagaacaattttttcttggattgtactggaagaatagtgcgagttcactctgtcaaattcatgagtaattagaaagatattgtcgataccaatcgctaatattaagaatggaataacctctgctagaatcaaagtagatttgattccaaaaatacttaaaagtcccgaggacgcaatcaccgaagaaaaaacgataagaactcctgcgcagcctaacagataccgagaaccgccggttcgtctttttaaagcccaagaagcatagaagaacatgatcaaatacgatgcagaaacaacaataatgtcactactactattcaactccttttctaatgacatttcggtattgaagctgattcgtagcccatcaggaatagacaatgatagaagatactgttctaacttttcttcccataattttgccgattctgtatgattggacaataacaatgtaacgacaaaagcgttcgattcgaatacattctcatcgctgaaaagaacattcgttttcaaaggttgctggaatgaaggcaaacaattcacgggggaatctgtacatgattctagttgttgcttccaagaggattcatcaggcaagataccttggaagtattgggtgacagattcgataacgcaggttgagtcttctgtcggtctgaagcataaatcttgatagctgatattttcagtggacaagaggttttccgtgattaggttttcagtttcaaaccaccattttaggttctcatagctcaaaacaggaccggtatcattgacgatgaaaacctgttcggtcctatagaacggaccgaaattagcatcaaagtgtgttttttctttgaatttcggggagcttggattgacccaaagattcacaggatccgtttccaaatcaccaaatactattaaggctatcaaaagaattgtaataaaaatagccgagtaagataacacggtaataggatttttgatgcaggcggccacagtgttcgaaagaacgtccgagattttatcattcatagcgtttctttcggtggcatattctacgaataggccatcatcaatatctgaattggcagcgttaccattatccagcaaaggttcactaccctccacaatgttagtggacttaatctttcgacgtctgaaaatgataatatgccaacctccaatcgcaaggaaagctaacgcatacaaaaccaaaagggcaaaggaagtgcatggtataccagctaccatgcaacgcccttttttgattggagcaagagttggacatgagtttgagcaatcagcacatgcacacttgtactttggatcgctacaggcgaaaacgttttcgtcaaacaatgagtactcatctgaacttgtctcatattcatagtttatttgaaatggagaaccccctaacgcaggctttttgtctcctaaaaatttcataaattcagaataatctgacgcaccacctcctatcaaatccatagcataaccattcgtagctgaaaattttacgttcttacaagaatcataaaatgatgatgcccatgaagagttcaaaaagaaattcaactcagaaacaatttctctaccatcactcgattcatctgtactaattatatcaataaactgcctttggttaggagaacaagtgaagtgacagaaaattgtgttgaaattcttcttacaagctggacaggaagcgattatgctttctgctttattcaagttttctttcaaagcttccatttgttctctggtacaacataacctttcattgtctcgccattcctccccacatatatccacaagaaactgtacatcgccttgatcaattactggaggttcaaagtctgcatccacgggacatggtaaagacgcaccaaagacgcccttcttaccacaattcccatacatcgcgcacgattcctgtgcatagcatgtatgtattaacagtgcgactgccacataaatccattggtaccacatcagcgtagcagaatccaacttgctgtagtggggttcacgtctcgtctttcctttatggttttaaaggtttctaaagggtttttaatcgacaaagttcaaatataactcttgttaaatattaaaaatgtttgaacctatttttcacgcttgcaacataaacaaaagttctaaagggaatacaaaaaagaataatagcatttttgtccaaacacggctgcagttaactattaatctgctgcatgccaataactgttagcattagagcttgagatttgattatgactgtgctgcacgatttaaagataacaagaaaagcgcttgaaagttggacagacaatatatcttgggggaaagatggaagcatatatatctctacccaaccacagctgactatttgtgaacctttgttctgtaagtcagttcaaaaacatttgaaaaatctctttcacgttaaggagttacatcttcttggtcctgataataaatttgagaatgttttcttagatcaaaatcaaatactaaactcacaaccggaacctgctattgtgcgcgttgtcccatcacctcgcccaggactagtggcagggattacgaaacatgcgaacattctactttgtcaagacaatcaagtgttatgtcaagttgatgatacaactgcagcttaccctaatcgagcgtatcattcgttggcatggaacgataaaagtgatctactattcacaggaaatgaaagaaatactatcgatatattctctgtatccatggacatcgtagtgacccacatgaaaagccttccattagatttcagtgatcaaagtgaaaataattgggtaacactgttgaggtatcaaaacgaaaaactgatatgctcgaatagtcaaaatgaagtttacttgatagatttagcgtcctcgaccataaaaaagatatcggaagctactaaattctcaataagtgatatccagtttgtcggaaatagagttttaattacgagtttgggctctatccattgttatgatataaatgccgacaaacacacaatagaaacatttgatattttaaatgagttctttattattaggttacctgataaagaaagtgctatccttttatctgataagacaagtgtgaaagtcgttttaaccgattcgaacatatccctctcagcagatgaagtgatttctcctctgctggagaagagatttattaaatggaacaatacatttaacgaatatcataaatacgaaaccaagttatatgttagaggtatttctccttctccagatggtttcacggttgcaatactctatgatatcgaaagattatctttgaaatactctattccatctgagcaagtctttagactgcttattgtacctctatctgataaatgggaggtatcagataaagcgtctggtttggcttggtatcaaacctacaatgtatacaatgcaccagcttcaaatatggctaatttgataagcgaaaaagtctttgatacttcccagtcattcgaagactacttatcatcaatcctaaaaagtaaagagatgctacaatggagattcagtagcttcatagaagatcttccatctgctaaaaaaatacatacattaatcttttcttatgtttccaaccacctaaacgaaatcacaaacccgttagatcaagcgtatgctatttggttatctgtacttctaggagaaagcccaccatttgagcttgcagcagtcgaatttaaaggccagtttatttcggaatattttgatttcaataagaatgcgaatgagaacatcattgtatcagaatcaaaacatgagtggaaaaggtgctgtgttactggcttacccctgatatctaccaatgttaagatttgtccagtaagtaaatgtcgtgtaattgacctagaaaaggataacttaaacgactatgggtggctttcaactattgttttaaaaatatttggtaacattagtatatttacaggtacaaaaatgactagtgtttaaactatcatcaattaataaataatacttctttggatagaacttcgtttactttaggaatgagtgacattcatcgattagatgcaaaaaacacagaagtctgtgcaaatatctctgaagttttaagttccgacttaaccctctttctgacccattcagacagtttatgttgaactttattgtttaagtatctattgtctacgagatatatgcatgcgtaatcatttgcgtgtcgaattgctcttcctatactctgattaacagccttcatacatatattctcatagaattcgatagttgctgacttagcgtcttttaaagaacctccggcagatatcaccttttgctcgatatgccgttttttgacaagtagttcactactatagagatttggatatggaaggcctaccataacaactgctctcgctaggttatcttggaaatttatgccctcggagagtttacctcccaccactgagaatagaaaggcacctttttttttatcgagaatcgtcgaggaatattgtggcagtatatcacttccaccaggagtctcatagaatattctcttattcatagacagtttttcgaaaatttcctccaattgccaaaatttgataacgtgctcaagatacccataactgggaaaaaatactacaataccatgaggtactctgcagccaagttccagaaggaagtcataaagcttgcacattactgattcgttatttctgctttcatagttgaaattgaatccctcagatacgataaacgtatcaaggtttgattctggtataatatgattgcaagaaaactgtacgatatcttttgaaggaacaaaaggcagaagattctctatgaattcggaagtaggttgcatcgttccaccagcaagaataacgcatttactgtcgtttactattgtcttgaaaatctgattgggttccagcagcatgtatttgattatcattccttcttcgaaaaagaacgaaccttcaaaagagggatttgatagggacaaaacaaattttgagattttgaaaagaattggttgcttcacagagtttgtattactttcatcagatttgagctttgaatctgcgtaactgtcaattttatatgcaattttggagcctctcatataagttaccagctcatggatgtttaataaatccgcattactatctcgaaacattgactgtggtgaaatttctttccctttctcaaagtgagattctataaatgcttgcagtatatccaataatttcataagcttcattatgttgacacggttttttccgttgagtttccttttaaacttgttgaggtaaattttcatcaacttcttgcagattttaatatcagacagcgatatttcgcagctatatatagatgttatagtatccatcaagttgtgggcctcatctattatcacaatgctgtctttaagattgatcccaagagactctcgaatttcaaaggacaatatatgctggtaaggcagggtcactatttcggcaccctccaatgctgtccttgatgagtagtacgggcacacatggagggaatgtcccaactgaaccaggtcttcgatgtcactaatttctgagaatgtataatcacggaattgctttgaagaaatcaggtccctagaattggtataaaactggcattcttgccgtttcactgtttcgacacaggcgtcatttatcaagtcactttttagctttgataccttcgcatggatacacaattgttttcttgaggcaagtggtaaaaatttgatgcgttctttttctagtgtaggtgatgacggcggaaaagatggcaaagtcaattgagatgcaaattgagttaactgtgaatgagttcttgatgagaagtaaattttcaagggggatttcaattccatgttattttctgtttttacatcatatcctttgtcaattttagctagtagcttctgaatttcgtcatttatctggcccttctcataatcgttttgatttgaaaccgaatcttgttcatagggctctggaaggaaattagtttcatcatcctcaatttcaatttctatatgtcgaggaactgtcttttttctctttctgtcgccaatgtcgagttgccttagtacaggttttatgttggacatggaaagtccctctaaatagttttcgtattcttgcaaacttttggatttctccttcataattttatcgttatagaactgattcacccattctggttcgtcgtcagaagatgagaaagtagaatccgacaaattgtcattgtccactttgctattcaatttttctaatttatgctcacgcaaccaagttacagtgctacagatcagagataaagttttaccggtgcctgtaggactttcaaagataccaactttcttaccagaattcagtagctcatatatatgttccattaactgtgtctgaatatcataaggctgataaggatgatggaaattcttacccatagttcgacaacagtcaatgaactttgctccagtgagaatataaaccttgaaccaactttgaaatatgtttactggtaagtcatacacgcatctcgtatgagcaatctaacacaacaggacttttcgaatagcaaaagacacagacatgcacttttcaataccaactgagatgaaaaatagaaagacattccaccattcactagaatctcatcgatcatatcaaatcataactattacgatcttggaaatcattatccacagcatgtaaataaaagaaagaaatagttgtgctatagatcacgtgatcttagtgttaagatccatctatacgaaagtatacgagatagaaagaactattacgtgacaactcttttatcatatacgagatagagaagtacaaatagaagagaagaatcaatcttatgccaactcataggataattaggcattatataatgtaaagatgatggtagagagaacgagcaatactcaccacacaacggtgtataatattagtcaattgatgtcagatacagataatatgagcgaaggaatatcacaatgtcagggtaacactgaacagagagattccgggactcaatacttagtgttgatgtgtctggtatttccagtcacgtgttgttaaattaagatctttggtatctgatgaatccatagcgtttattagctatatatctagtagtgtatgttgatgcacctggcgatctggcatgactgtgttgatcgtccttgtacagatccaatgcctccttatataataactcagattggttgatgatgtttcaactagaaacaatccttacgtatcatcttggtacttaaccgcctattacattggtagttacccgatcatagtttatgatccgtttcaacacttagtggccgaaagatgtttttctgacctttttttttccattatcttcgaaggtatgattcaggcatatgtacttgttcagtctacgtcattgtcagggcaatctctaggtacaacccttcaaataactgaaaacgcaggtttctccagcggtttctgaataaaatcctatacagactcattgcactttcgtacatggattatgaaaggtgaaaaaaaaaaatgaaaaggtgacatatgcaggtattctggataaatcgaaagcaagtcagaacgggaagattgttggatttcgataataaatctgctcgagatataaatgcaagttctgtcacacctccgggcaatatccggccaggtatctatttcttttgatgtcaacagtatttttttttttcattttgtttttcgagatctctaactggtggggagaagactacatctgttttacagtttctttcgttaatgttatattgggaacaggttaagatagtgctatataaaggttaatgaagcaggaaactttctgagtgccactattaagggctgtattagtagtattatcattcagaaacaagaaagcactatctctgtctatgtctactgttccttcttttcaaagattgtttatgaacgagatttattgagttgctacattattattagagttaagataagcaaatcgaaacgaaaaaatcttcaatattagcatcagaatagttccgtttcattcattaacatggcatcaccgatcttcatatcaaagaaacccacttcattgaccagtgagtatttttttcttggaacaaaatactatgggaattcattgattcgaatatcaaatgggattaaaacattgcatccagatcatatgaagaaatggattccgatattgctgctgtctagtgtcacatacgcttttgtggaagctgctaaacattgtgtttcgaagttaaactgcagaggatgtgagtacttgaagtgcgttctggatccacatatgattggtatatgtataatacagttctgtgtttcaagtttcgagaccacgttctggcaatcattaaacgaactggataaaagatatcatctgcacagtggaacagttaatctacaaggtataggaaaacaacgaacaagaacactacagttccaattacgggccacgataacgcagcttttcttgatcatgacagtatcatggtttccaagcatcgcatgccatgccataatttcaattcttacattcaaccaattatctcatcggttcggtacagacatctcatttttagtatgctctctcttgttgttgttcccaccgatgtggcaaataaagtttttgtctcatttctgttcgttcaatctgttgatcagagcgtctttagcaccgtatttcaacaagacaatgctacagaagagtgaacgacacacgtggattcagtcaagaagcggaatcttgtacggatacatgcttcccttctatctgatgattatctcaacttcttacttatctatgatagtgttttatctatcacatgtctctggtctaccagaactgattagagaccttacagacccattccccgacccatacctacctggcacgattcagatgtcaatatggaattcgaaacaatctctttggtccaataataaattgaaaactagcgatagagagaaacgagactctgactcagagtgagacttattcacgtacaattttcgggcgttgttgaagggtattcccgaatatcctccaaaatatgatccgagccattgtcttgtaaacgccctcattgctttgttctttttctttttctttttctttttttttttttctgttgttattctcttgatctttcatcggtactttcagctgcattatacttcccaattagggaattgaatgtaaaatattccaacatcgttctcgagctgtgcctactacaagcatttaagtgcattgtcaacctgttcgcatagcaatgcagattgcgacaagttgggcaacaaacgaaaggacatagattattatagattacaattgatatatcaccttttctggtctgtaacgggtgctcgaaggtgcatgccgacaattagttgaaactgcaagtttgaacgcgtcaaccagtgtcgatattttcctctcttacaatatgtagtacaatcaaagtgtcgatttgctattgttgtaaagacgaccgccaatatttgttcaattaacattctgtagatgctaggataggaaataaattttatatcgaatgagtagtgaaccgataattttccgcatttgaaaacattgaaatgccgatcctgaacggctttgctatgaacttgactacatgtggggactagaacgaagagaaatgctactagaaacataacacaaagaataaaaacatgattgaatagtgcaaagcaaatcttctagttgaatctcgagaacgacacctacgtcaacacacttgttcgaagacattattatcttacttaatcgcactgaaggcaaaaaaaaggggaggatatatcgttgacgtgttcaagaattttaaaactaatctagtgcgagaagaattcagctgagctgaaagctcattataaaaacatcagtccggcagcctatgacttttttttccagaatcagattcaaccaagaaatagcttcaaacaatatatttcaagcaaaacttagtttaaacaacataaaaaactgctcaagtccattgtttatttttctttaccgatcgcccacataggagaagcgagtctcatcagtttgtgtccctttttcaggctttaaggaatcacaacaaaaaaaaaaaaattccctcgaatatcccaaaaatccaaccttaatccctttaggactgcgtttaactttagcgaacgataccttatccgagtatttattgttcttaactgcagcattaaacgtaaaaaagaataaaaaagagtaccccaataagagggcgactggattggtgaattgtattttttttggagtcactataacgattaaaatccggctaattgcactgtactgacgcacccgtacactttataaacatttggcagcgttctctgagcgtccaccgcactggaaaaacacaagatcactcacataaaagtggtacgtttgttgaaaagtaaaatcgcaacatttctctcccacaagttttgcatatacacctgctccctgcatatgtttattctctcaaattaccagtaaaaactcgtttgtgcattgttttcacacgtctgttgacaaatctcacattttcagaaacaccactcgagcgttctttctttctttttaaagttcgtcgatatcgtttctacaggaagagaaattagaaaacggattagaaggggaaaaaagataatcctgcattgactccattcgttttttgcctttaaaacacgtcaaagggacgaatttattaagaaacaaacaggaccaatacccaatatctgttctagtgtaaaaccttagttggtaccaaacagcagtaaggaatactatcttcttttctcaggttcttttaggttattttggttagctgtattgggctaacagacgtatcaaatcacatttggctactgaatcaagtttcgttcctgaacgtgtttattcttttagaacgcagaaaccttttttctctttgaactggttacgtgcgattggtcatatatataggggcaagttatcattacctcagttcagttcttataacttggttaaccatttgggtacaacaagtacattagctttgtccggttcccattttttggtctttacaactgcatatatgtttgaaatgaacgaccatcacacgtccgttaacgggaaagggcttaggagtatgcttatcgaaaagtttcatcaaaagttctcacatgcgaaaggtgctgctgcaacacagcagcatgtggagccgccacagcaacagcagatggaacatcagcaacacacgcatcctcacatttcagtacccccctcgcagccttcaatagatccagatgttgaaatggatctcgaccatgatgaatacaatattactgcctcgtcctcggtagacatagtctccgaaaagatggggatagagcatgacaatatccggaatacgaagccaaaacctttctcgaagcagctgaacttgaatacagatgcatctacatggtacgtgctagaacaacagcaacaagtttctacgccagttatgactcctgtaaatcagtcagggccgcctcacatatatacaaacagacatggaagcatgtcatctcttgccagttctgtttcagaactgggatattcaaatggaagaccttctactgccaataatatcagctctattcctgcaccatttaccccccagtttgtctctttattattggaggtttacctacaggtctgctcagatccgacagtcactccattcgatagcagtaacccgccttcggggattctgcaccgggtatctaaagtagcagtggaaacagctgatgctgatcaagttgatatcggtctggagagaaattcgtggttgttgactttagtgagacagcggttgttgaaagaggtgcggaaagaaaactatctttcaagaaacagttctatcatatcactacctcctgttcctcagttcggaaacgaaggaatgtctaacaatatgctacagcaaagtccacaggattatttcaattgtcattctgccgaaagtacaaattctccaccttcttcctttactacgaactattacactggtttgaactcgccattcgaatctagaccatcgtcgcagcagttgcaacaaccgttacaactatcacaaggcactacgcaagttcctcctcagaatccaaaagctcttgtcaggtcacgaaacaatagtttcattacagccgctagtagatcaagaagtaactcgttcaagatacacccacaattgtcaaatactattagtggtgtacagccacctgctcttcccaatctaacaaggtcaagatcctctagtaatgctcatttctttcttactccaacaaattctatcccatcccaatcatctttcctagcacaatcaaccgcaagcgtaaatactcttttgaactcaacttcaaatgctacaaatactgctgctgctggtcaacagcctgatgaacgaaacaatagattacccacacatatagaaaatgaatccaatttatagttgcactggaacacaatttgactcgatgtaacatcatgagcactaatctccaatacaaacctgaacattacaccaaacatacctattaaatacttgagaagttagacattcactcactcattcacaaaaacataacataaaccatctttttgttcttgtaattttgttaatatttatgaattttcggaaatcacatagtttaacagtcagtattcctcgatgatacttccctcattcagggaaatatatgctgatgacgattattattattgtgtagaattacctgatagcatcttatatatggtgatatgtaaatttaatcacttcaattttaccgcatggggccaagctgttaagtgtatgtaactactacattggtttatgaccggaaaaagtgcccgaattcctcttatcaatttaagcctatatacatgagttcttgaccgtaagaaagccttgggagatggtgatttatgccctgattattgatataccgcttttaatacagtaatcggaacagctggtctattcttcaaagacttctttcctaggttcaataacaaccctactacttgtgtaggtctttccccaattttcatccaggattccagcttttctcaatagtcttgttaccgtatcactaggttgagcaccaacaccgatccagtatttagctcttccgaagtctaattccacatctttagtaggaacaacaccttgtttaacctctttcttcgttaatggttttgggattgggttgtatgttcctaatacttcaattggtttcctattcaacgccttatgtttgttggtaacaactatgttgtatactggggtatgtttccttccgaatctagctagtcttatcctcaccaaacctttcgtcatgattattgtatttcaccaaacttggcgttaaattctggtttaagagacttggtttactcgctctggtcgtcttgatacataatatgtttgtcctgttattacgcttttaatgttgattgaatttttttttctatctttcgaaggattttcaacaccaactaaataaagcatgtctatcacgtgatataggtgggatatctaacagccgtatgagcaacattcgtcttaggcgtttatggcgacattacagcctaatagtataggaagttgatctatgagaaagtatctataagtgagaaagtgtttatttactggagttagactgacggtgggaattagtttaccaaaaatgcagtcatataaaacgacttggcattacaaataacatcgcattcagtaaagaaagttaacgacacaaataatgaaatagtatgttcttgaacccgtttagcagacgcatatatacagagttggcatatattaaccaaaatttatttactttttattctctgctttcttcattgcctcacgatccttgctgcttcatcactaagggcttaaaaagaaatttttcacaagctgtataaaattttcaatctagctcatctcatcgctcatctcatctaacaagtagagacgagttataatcaacaacacctcagaaaagagaattactgagtttaacttgggattgaaaactgacaagcgaacaaattgtgcaatatgggtcctgaacaagcgtccaagcttcttgaacttgaagataagcttgctaaaatcagaggacaatctacatcaaaactagagaatcagaagcacattgccataatcttggctgctattgaagaaaatattaatgagcaagaggcaattaataagaacatcgtgaattatcttatttctttgatgtccttgctggatcaaactatcgatacagaaactgcggccattaaagatctacaattagcaacatcaacgatgtatttgttggacatcatttttcattatacaccaaagaaaatattaaagagcaggtttgctgatattttgattaaagttgccccatgtattactgatgaaaaggctaacgctcctttgatcaaatccgctcttggttgtttagaagctttgttaattgcccaggatacgcaaacgtggaataacactcaaaatttaaaggtgactccaacaagaggtttggatggtctacttgagctatctctagatccaagaccaaaagtaaggaagagagcacaggatgcaattaccaacattctaaaaaaccctccacctggtccaacagcagaacacgtcgcatcacctttgatctcagcattcgctattaatgcattggtatccatccttgatgaatctgcaacgatttccaataagaagctaagagcaatgggaggtgcaagtgaattgaactccaaaatcattcatattttgaaacttttgagcaatataatatcaacaaatcaatggccaactgcgcatgtggaaaaactctgtgatctgctattggaagtttgtaaaacctcggaccaatttttggtatctaattcttttaactgttttgaggttctattccagtctatggccgagtcttcagtctcatctggcttagcggagaataaattcatgaaagcccttgatgtcattttttcattaaaaccatcccaaaatgatacacatttggcagcagcctggattgcagtcgtcgctaaaggtatcagcacatatgcgattcacgatccattaaagtgttttgttaagattcctgaagttttcagaactttatcattttacctatcaagtgagattccagatatctactttagcgcagcacaatgtttaatcgctattgtcactgacgcaatcaaatcagaaattttgttgtatccaccttccgtttccgctgagcactttgaagcagttgatgaagttattcaagagttgtctgagatatttgtggatctattatctattaaatacacacattgtgctaaggcagtgttaaatgttttgacggctactttcaaaaagttgaaatatagagccaatccagattttatcaaacctctagagattgtaggcagttggagaacagatgaacaaaacttcttggacttgagatccgaggcagaaaacgttatcggtggggctatagaagctattggtgtagatgctgtactaggatgtttaccactaaatttaattagtccatctacatcaaaaccgggaagggcctggttgttaccaatattaagagactccatccagaattctacgttaaatacatttttcaaagagtttttacctcttatcaaacatttcgaatctcaattcgataaatttggtaaagaatctgttcagttaaaggtatatcaaactgttgtagatcaaatctggtctttattgccaccattctgtgatttgccaaccgatttgactgaagctttttctgatgaggtggctgctgaattgtctggtttgttatattcccacgttgaacttagaacgactatttgtcgtgctctaagaaatctcgtcgaaagtaatctagtatatcaaaaaaactcaactacagattcgcttcttttgcaacacttttccatagaaagtgctacgaacagtttagaatacttgtctaccaaatcttctaatatgttagcggtgctcttcaatgtttatactcaaaccgctccaaacgccagaggatatatccttgagacaattgattcttatctgcaaataacaaagaaagaagaccttgcacaaacatttaataatgtatgtgggctcttgaatactgctcttcaagaagaagctaaaaagaacaacaatgaaatgtctgctactttgctcgatttagttatcgcgatggtaaaatatgttccaccttcctcatatggtgccctctttgctattttcaattccatcgtcaactcagaaaatgcattattccaaaagagagcataccgtattattcataaactttcagaaatcgaagaaggttccgatgccatcacgaatttcatatctgatattgaaaatgtcatgttgaacagcgcatcaactgttcacacttcctctaaatcagcaaggttggcggcaattagaactctcgtaaatttacttccacctactcaactaggatttattgttcaggttgtggcagaagtcatattgtgtaccaaagatgtcaacgaaaaatcccgtgagacggcttttgaaattcttatccaaatggctaacaaaatggatagttcagagggtgttatcaaactttcctgcattccaaattatgaccccaacactccagaccaaccctcttccgttgctgaatttttcagaattatttcagctggtttaattggggaatcgcaacatatggtaagcgcaacaatcaccgcatattcttgtttggttttcgagtttaaagataaagttgatgttgatgttctcttagaaatttatgacacaatcgaactatatttaacctctaattcaagagagattgtcaaaagtgcgattggttttgcaaaagtttgctgtttaggtctcaatgatgaagtcatgaagcctaaagttccagaattacttcctaaattattacgttggtctcatgaacatactggccatttcaaggcaaaggttaagcacatcatagaaagattgattaggagatttggatacgattatattgagtcaatattcccagaagaagacttgagattgcttgccaatatcagaaagtctcgtaacagaagtattcgtaaacgagatgaaggcgaagaagaagcgccagcgcaagctgctccttcaaataagtcgtctagattcatgtccgcccttgatgaagctctatattcttctgaagaagagagtgaagatgaagacaaaaacaatacaaaatctgatagaagaaagaagggttctaaacaattcattgtcgagtcgaaggagaccccattagatttattggactctcaaacattggcgcatatttcctcgactagaccaaaatcaaataaaaatgaaagaagaaggattgtcgatgatgaagtgttcagctttgatgcagaaggtaagttggttatgaaaaacgataggagaagaggagaaaataacaatgaagatccgttagaggctattaccagtggtgttaatgcatacttagatgctgtcaaacaaggtccagtaaagggtcaaaagaacagactaaaattcaaaaaaggatccagagctggcaatgaggatgatttcagtgatgatgaacaggaaaccaagctaccaaaaacaaaaccagctgaaaagggaagaattggtaaaaaatccaatggtagatttaaaaacaagaggagattataaatcacttttacctgatatgcactgcaacgccctagcccatttatcaatttgatagttgtatatagatgtatagtagaatagacaaaatcggaaccaaaagattgttacatgtgattgatttgaaaacaatcgagtgagagtgcgattgttttgtcgtaaacatgaactaattttgtgttaaacaaattatatttatatatcgtatgcgtgtccaaaatccaaagatgcccttctttcaaatgtattttgcatgtcctccatttcgtctaactctgtggtaactacattgcctaaagttaagcctcccgttccagaggtctcaaaatcataatccgttttatcaatatcggtgtagtcttgctgatcttcctccgtatggaggggttcaagtaaatcgtcaatattctcatcttcatatgaaacaactatgttttctaacttgttatttgggttaccgataggtaactttgagatgagtcttttcagaactatttgctctgctgcgtcttcagtactttcctcttttccttcttcatcttcgttaatttcgattccaactggaatgcatgaattggtaatgataggtcgacttcggcttagtttagagtattttaatccaggaattgacggtaacgaaatgagatcttgaggaagtttccccgacttcctcttcgcaagttctaatttttgtgatgtcaacatgaattgtatccagtcatccatatccccgttgtttatcattgcttccaccaattctgtctcatcatctccatcgttaggctttttgtccgatgtattcagctggttgatatactccggaatcattgacaatggtttactagttttatcaccaactttcaacaggtctggacttggggtactgataactcgtgcttctgttgttgcgggatcttgaagtaaccatcttttaaactgttgcataccttcatcgcctgccacggacgggttttcatcgtaaacatccagtaggttcattggtttaaatacgccgatattgagcattccttgggtaatatcttgaagggacacttcttcatctaaatcacggcgatccagagtaagtttccgtatttcttgaatcatcagttctagatatctcacatataaatcagtaaaaagattaactgtccccattttggctctatcgaagccatgtgcccttaaaaggtgtatcattgaaattcgcagcagcgaaaagtaaaaactttcatcagtggtcataattgtgaggagctgagtaaagcaataacactttgcttgctcaatgcttagagcgtagaatatacaaaatactgcaaagtctttgcaattggccggtatttaacttatgataaataaatcaaagtaaatactgcttagtaaatcaatcagtgtcctcgaagctcagtactggttgcattctgcatcgaacgaaccccacaatagacagttttcgttaatgtatagtatttgcatggctaacctacttatcagacagtaaaagttacaagttccttctgtgttttccattacccggaaacaaatcacgtgataagagattcgatcaaacacttgctgtttggcgttactggagcataaatccgtattcaatgatatcaacaggctttcattgccatggagctttttacatggacagctttacaagacatccaaagaaggctactgattctaattacaggaatgggcaatggttgagagctgaattctgcctctctcgagcgcagttcctatttgtcctatatcttgtcaactgcaaatttggaattttcgcgtaccgccaaaccagcacttccctcctgagacagtaaaccattgcatcagtactgaataacacgaatagcataccctggaagtaaccaagaagaaaaacataaacaacatggttaacttatctctatacacagttaaagctgtgttgattttggatggagaaggaagaagactttactcgaaatacttccatccaccacacgaagaaatttctgcagattctcttgcatccagcttaaagaagcaaaaagagttcgaatctaacctatttgctaaaactcatgggcagaattcagacattatgatatcagacgatctattagttatttacagagaatatgtcgatgtttcgatatatctgatcggtgcaatcgacgaaaacgaaattgttttgcaagaagcattcaacgggttcaaagattccctagaattgatattggatacaggtattgacaagaggagtgttcaggaacattatgacatggtggttctagcaattgatgaattgattgatgatggtattatcttagaaactgatccagccacaattgcctctagagtgacgaaaccgccttcaaaggatatcccattgaatatagaattgaatgaaaagggtttgctaagcgcgtggggctttgccaagagtaaattggctgaaagattacagcagggcttgtaagcttctcctcattttccagatttcttttataatcagacacatatgtttaccatcgatatgtaaatactgtgtgaatgtctttgcctcttctaataaagatgaaactaagataaatataaatatgaaatacagtactttcactttatatgctaattagttgattttaatatgacagcgtgaaaactattcgattggtcaaacatatctctgaatgataagaatttgcttgatattttttgtcatcattttttagacttcttacctttcgccattgattgctttgatttatgtgatctgcctgaggatgctttgtcgtttccacctgggatggaaatcttcaatttatcagaacaaataataggaacgacatccaaagttttgattagctttattgtttcatgttctcttggccaatctaagtctttatcgtactccgaactgtcgacagttctattcaagaagtaatgtagagtttcattaatagatttgctcttctttgcagtgccaggctgtattttgactttatacttatttttagttaaagcagcccagggggcatagacagggataacgtcagctattttatcatctttggaaataccggttttcaattgattcaaaaattttggaatatcaacttcgaccttttctgatttgttaaactgcaagatgcgagtttgctcttggtttttacgtatccgctttttaaactccctcttttcggctctttccatctcttcaagttttttttgcttctctctttcaataccttttaatgttccaagtgcttctagtctcaataatctttcttcttcatcttggtcaaagtacttcttttggatttttttcaatttccctctcttaccacgaaccgctgtattcatattttcaacaattgaagtagctatagtcttactctcatcaaaatcctcttcacctttggataaatcactatttgagagtttctcgtacccatcagtggcctcttctcctgctaaagccacttcatcgaaattgttgacatcgaaccctagatcattaatttcttttgaaataacgtttacattattatcaatttggtcgactgggtttgtttccggctgagaagtatgacttgtatcatcgtcagatgcttctaagtcactattttgttcatactcaccctctttttcctcgctatcctctgtctttactttccacacaagtcctaatcccatcactaattgtgctggtggcaacatgtttttagctttaggttgtttcattctaaatgatccaactggaagaacactgccatcaatgtcgtcaaatttcgttacatttttagcgaaacaccaccaaggagaggatgcaatcttttttgaccatgcatcacttgcagaatttgcaaaagtaccagcttgcattagtgtgtttggtggtacttcagtcttctgagggttcaaaatccaagccttcacgtcaaatgcattggtgaccataatgtcatcgtcattaacatactttgcataaagttgatcagtttcgacgggactcttacccatcagtacgagaaaactttcgctagaaataaaccagtaatatttttcgaaaaaatatggagttctaattgctttcaagatatcatgagattcctttgacttcttttgtagatctttttcgatcttttgctggatactttttaaagccttttcagcattcttctcaacttttttttgtttctctgatgtcgcctttttggcgttgaaataactggaggcgtttgcaaatgccgataaagataaatcgactgtcagcagaacagtttcccgtttctctgatgttatcttggattttcttctactttgctgtttacttttggatgaagttagttcttcaaaatcagaatcagaataatccgatgagacagaggaatctgattggttaacatcactttcgtttgatgaataatcagcttctgactgatgatgttcagtagaatcatcctcgctgtacccatcttttggtaattcaatggtaattttattatttggtaaatccattggcagcttaatgatccgagcaatcttgttgcctttccgctgctcgtttgctattaaagtttccatactttgccagtccatttgttggtccaataagcttttaactgcattcttggcctcttctactaaatttgcattagctatcaaaatgtttcctttttcttcgttagtttgttgtgcatgtaataacgattttataatagtttcattgttattctttgcctcatccaattttttttgagcctggaaatcctgattttggatacggctagcatatttgtttgattctattgtagaaaagaatgtgtctacggtattattgtacattccgccgatttcgataattttgacgtcagtggaatctcctacaaagggtttgaagggatggaaatttgaaaaagtgtattcaagttccggcttgtctcttaaaggatcgtacagtttgttcttatgagccactatataacctattcttgttgacgtagtcgagatcaatttatttgcttgaacttctaatgaggacattaagtcaacaagcacagagacattgtgtttaaactcaagacacgaagaagatggatcaataccaatagctttcaacgagttttgaatcaaatcacttgataaatgtggagcatgaacaaataaaagtttttgaatagacggaacagatgcttttcccttgagtttaccttttttagcctctccgggcacaattgtgcttttggctttaacgtcggcttctttcaaccaatctgctatttcattttcgaaatattccttaggatcaggaaccgtagttgaagtttggttaatttctgcaaagttggccatgtcataaaattcaccaactttcatcgaataatcatcgacaactctctgtagtaaaagaattttttggtcagcatccaataaaagcacatttccggcactgaaaaattctaaaacaaggtagtacttaccatcagcaaaagtaaacacaattattctgtcatttgggatctgcttaactgccgtcaatcgtttttctttcaaatacgatctcaatttggaaacaaaccacgaaggagtcgggggaatcggcctggtaaagtcagtagtatgaactcgcaatccgcaatcaatgacaacgtttaacttggaatcgggttttccaaactttaataagaattgcctgtttgagtcagcaatgttatagatatttcttaagcgaaatcctacaatttgattctccaactctttggatatcagttgcaaatctaacgaactcaatctctgtttcattttctagtatcaaatccaagattatagtttagatatttcgtactctccaagttgcagttaagtccactttaccagtctgagttgattcttttcgagcactatacttgattcagatcttcatacaaatcagtattttcactgctaatcagattaaaattattagaacttggtcactgctattagatcagatatcttttattacttaggtttaagactaaactgctaagctgatatattttccagatagctgtacctaggatgttagtagtatatgtcatctttgtctattcgcaatcactttatatatgctgctaatgaaggaaagaaagactacgtacgagtttgtattggaactttctaaactaccatgttgaaaaatgtcaaatatttgaaatcacatgacctgaatttcaaattttgaactagaaatccttaatatgtatatcatcttgcacggtgaaatttttcatcaaacaacaacccaaaaatgtaattcacttaacaagcaaagtagtttctatgctcaaaaataagtgatcagagatattcagagaccgtttgttggaagattgcttgaacgaaacgcaggcaggtagcgacttaaatcacattacttgtgtttttaagagaatataataggatttgtcgacaattctgatctagaaatcgatttttgcccaattagtataggagtccttatattcctgaatcactgaacgatgtcattcttcggttttgacgccacgggccgaaaacctcgtgagaggaaacagcaaggcgaggaggattctttagatttcgaagaaacgtatcaaggcttgggtgattatgagccagaggaagatgatttgctcaatgatgaaacttttggtactggagcggatctgggtacagattttgattttggttacggtaaaggggagcttggcgctggttcaggttctggtagggcaccagcaccagctcctgtttcttatgcatctattgcaaatgccaaaatgaacagacaagcagactgtaaacctggtttcgaacaatcgctggacatgcaacctatggaatctttatggggtaacagctccggtaatcagcaacaacaggtgcaacctcaagcccctacacaattccaagccccaccacaggttcaacagcaaggtgcacctaatgtggaaggattggccattcaatctttagacagacaacaacagatggctatgccgcctcaacctggattctatggtatgcaacctccgcagaaccctggctacggctttattccacaagggttccctcaaggtcaataccagcaattccctgggcaaaatattccccctgttatccctaatcaattcggtaatgccggatttcctaatcaacctgttaaccctcaggaacaattccaacaagtaccaccgataatgtacaatcaaacacaaggaaacattgcacatcatatgcaacatccgcagatggctatgccaccaatgcaaaatcaacctcctgttcagccccagcagccccaccaacagcagttacctccccaatacttgcctcaacaacaccaacaagatcagcagcaccaacaacaacaccaacagcaacaagtgttccaacagcctcactccgttgacactgctgctagaacccaagctgtccgttctactcaagattatgagcattctaactctccaacacctgtgccaacagaatcagagcaggtgccaactccacctcatacacctagagagtatcgccgtggtccaaggaggtttggcacccaagatcctttgactgatgaagaattgagacgtcttcaaatcagacaatcgaaggttgacaaaattctcagacactctggtgtaatgactccaagagacaaggattttatcaccaggtatcagttatctcaaattgtcactgatgatccctacaatgaggatttctacttccaagtttataaaatcattcaaaggggtgtcactccatctgaatctaataaggattctattgctaaagcatatttagagcactcgggtcacagattaggaggtcgttacaagagaactgacgtcgcgttacagagaatgcaatctcaggtcgagaaggctgttaccgttgcgaaagaaagaccacagaaaagtaagggtgggttggataatgccaaagagggtgtcttgggtaaaatctcagctactaggaactcaaaagctccaagaaagcaattacaaatcccaactcacaaagaggattctccagcgttgtcttctcaatcaagctcagccctagatgaggtgtctgaatctttgcaaggcgtggatatcaatgccaaaagaagaagatcatcttatgctttgagttcttcagtggaccatcgtacagttttatcccgttctggtggccgtaagttcattttatcattgattgaaactgtttacgaagaagtgcttgaactagaagctcaattgagatccggtcaacagccggacagttcaaaattatgggaggcgctacacgttgaggaccacggttttgacgtttctcccttcatttccatcttatctttcgacaaaggtatcaagattatgccacgtattatgaatttcttgtcaagagaagagaagattaagcttttcaactgcttcttcaaggaactttctcatttgaatgtcattgtcatatcatcgtacaagactactccacttcctactaaagatcaactgaagaagatggaattgttccaatctgtgtttttgaagatcattgtttcgttcttatccagttcagcagagtttttggaggtaatgagtctactaataaatgtcattcagaataataacgtttctttcatcaccacatcgcgtatcggtttgaatttgattaccgtgctcatttcacgtgctgctttgatgaaacaagatgttagcaggggcaaactgttgtcttctgtggaagtatccacttggagtgaagtctatgataggctatttacttctttagaaacaaaattgactgcaattttcccaacacctgaatatatgcaacacgccatttcagtttatgaacaggattctactcagtatgatcaatcttacatctggcagttccttgcatcgcttgctttgagcggaaaattgaaccatcaacgtatattgattgatgaagtgagagacgaaattttcgaagtcatttcaaaggctgaagaactaaatgccccttctcaacaagaccctaaactggcttatcaaagaaacaagttctatcaggatttgaacttgttcttgaatgtcatgggtcttgttgctcgtgatggtgaaatcactgaactgaagtgatcgatatcgtgcgcctcctctgatcagcccctatctcgattgccactgttaactgtgtgctacaaattcgaaatcaaatctcaaggaaaaaaattgcaaaaaaaagtcagctttatagtatctaagtaattcttctatttactattacaaatgtatcatatttccatctactagaacacttcaatccttatgaacgccgaaagtgcaatatgtaccgtaaagccaaatgattcggttcctgttcctcaccctgtgtttctgttaagttggaatgtttaatttttgtattttgctaacgtaaacaattaattaattggaaaatgcaattctaaagggttcagatataaaaatgaagatgagatgagacaaacgaagaggataagaaaagagtagagataaccaaggccgaaatatatcaggctagaacatcacataacactcattggcttatttgatatcatggcagagattcagagtaaagttgcgctggttaccaaatttgtgttaaaattcttggaagatcagaacattataaatcaatcctcaggattaaggtggaagaataattcagctaaaagcgctacagttgtcattgttgtcgaaccagaaactgccagtaaagttttcaaaaagcatctaagtgatctagaggttgttgcattggaaatgggtaattcggaaaagtgtatggtgaacatttgcagtgatgatgatagtttggttcaaggtattttccagtattctacgttatttggggagcaaccatctttgagctttccaatatcggaatcagagattaactcactttatactgacgaggttttcaaaataattcagaccaagtttaaactttttgcaggtctgagtggatctgcactacgggaaagaccatctcgatcgccaagaattgatgaattgcaatcaaaagataaagatgatattttcaaggaaagggttgaaaggatggtagctaaccaaccaccaaggaatcctcagattcctggttttgatgacgagtatgagatacaaacaggaccaggcattccaagttctggggagtttggcgttccaggtttagggctaccagtaagtggatatggtgataacgatttgtaccctaatgggctgcggttcccacaggattttgatccactgaatagaaatagtactaatcagcaaggcggtatgatttatgatccattcagaggtactggcccatcaccaaatccgcagagtggcaaccatgatccaggtcaaaattcctccccagctggcccacaattccccggaactaaatatgacgatccatacggtagaataaatcgccaaggtggcggtggaggtttcatttagcatttctattggaaataaatacattgtttaagtatgtagaaataaaatatgtcgtattgcgtacgaatagctatattcatgttgcttccagataaaatatgctcatcgatgggacccgttaatagaatatcattattgttattcgtctgattttgaactatgcgtataaacagcaagagttttatcctctcgtttgtatattaacacttggacgttatcgtgttccaagataccgaatccatcttgatctagttccacctgctgtaattggagaacatcttcttttctctcctttccaattcccactgcttcaataatttgaccagcatcatcaaaagctatcattccaatggcattaggcaccatttcagccaaattaagactcatgctaactttagttttcgattgacttctaacgaatgaaatgtcaggatgggcactatttctgctggccggacttatcttaagttgacaatatttaaattagcactttcgatattcatattataaagtaaagccaaaaataaagaaaataaatataaataaacggaagcaagggtgtaaatcagtaagactttgaaaacattgaccggtgtgtttgttggtagtccagacaaggacttgaaaaatatccaatgagagcactatggctactgcttttacttgcagttatattcatggctgtggctgctttttactttgtcaatcgggttttatcgttcaaactttataagaacaattatccagccaccttatttgtgctattgcttaatatgttcctcttactctccatcgcatacttacttccattggatgttttttgtgctgctcagagttctggcattgggcaacctaaccccatcaattctacactctctgcaagggacgacatatcaccattatcgtctgcgctagagactgcaccaaactttcatttcttatggacctccttatattggtcgcaattcgccatatgctggtttattttgccggtcttaatatcatacgttgaattgaaatatctttatccacacgacacagctgattcttggagttatgtcttgcgaaggacaaaaacagctctctataagaatctaaagttttatgtcttctgcgccctcgcattaattgttgggcttttatatttgttgatcgctacaaaacatggcctcaacgaggtaaaacctttagtcattgccatgtctcatttgtattctttgagctataccctcatacttctctcgaatggactagtaaatttacctaaagcattattatttcaagtgcaagatgataagaaactttttgtgaaactcagtcaaaataatgaggatctaaacgattccaagttaagcctgttagaggtagcagagaaagtcctttctctcaacgttcaaaatgaaccggatgtcatattgcagcaatcagtccaagaatgtcagatggaggttcaaagactctgtaatgaattgagtttaacagttcccgtactgcatactacgactcggagtcactctttgactttatccaaattgaacgactattataataagtttacaacagagtactacaattacacatatcatcaggcaaaatccaacgagataatacacacattagtcagatctcagcgtaaagctctttctgtgtctattaatatatcagttaaaattatgggatttgttttagtgtttatgtcagtgttggtatttgtacttgagataacacccatcaaatttgggcatgcctcaatattcatgggaacaagcatttggaatttctttctagaaatggccattttattgcataatactatatgttcattatattcattattgcatgtcaagatccacaatttccatcttgtcagcaatggtaatagcagtcctaagaatgcgttgtatttttccttgtattcaagccggctattattcccattgtgtttcaactatatgatattaattcccagagatcctgacgagcaacatcaatcgagttttgataaggtactctatcgtcaattagaaaagatacctttggcaaaatatttaaacgagtatcttccgatgtttttcgttctaatcgtaccgatagctcagtacttcgatttgaaagagaaggttctgtctaagttgctaggtgaagaatattattatcaattatttggatctattagctcacgtgaaaggcctctcacaacatcaacaacgcaaagatcaagacttgatgatgattatgaatactctttgcaggacggccagtacttatatgaaagggcaacttcgcactttgacatgaatgggtgaaaaaatagataaacatagattatgtatatttccgcagtttttggtatgtacaatataattccggtattaaagttttaaagataatatttcaggcacattataccactaaatggaaactttctgaaaacaattctcactgtagtggttcgctactcgtactcaatctgttcaaatgcaaatagacatctgttccaaaaccttccatggacatcagttttagatcaccaccaaagtaacgcgcatatagtctgcttaaggctagcccgtagccataaccagccataggtattctaaagttctggctcatttcttcatccatcaatccaatttgctcattttcaggcatagttgtgtagagatatgtccatactaacggcaagttcgaccttgctataccgccaccttcatctgaaatctttacagtcaagtcttccgtaccctctgttatgataactttaacgtccgggaacttcaagtcatacttatccacagatggatttttttcgatagtcttttcgacagtggctcttagcgcattctttaaagtttcaaatagcatatgaatcaagtggccaggtacatacatgaattcaatatcaggagattcgttggggcatccagacttttcttcggttgaaggccggtagtccaacgggaaagttaataattgaacttttggagcttcatataatccgtaatgttcggcgcaaatgtgccgcgcattgtcaattgctgtcttggaaagttgagtgatattggttttagtacaaattattccaacccagtcctcatcatcttcgtcaaatggaccttctgcaggctgtcttgccgattctaatagagccaattgttgcccaatcagcattctaatcccaattctcgagaggtaaaatctatccaggaaactttgaatggaatcatcgacaacattctgttgatgagtttttttccacttaagaacacccttagctaaagttattacggtagcgtcatgacgttctttgatattttgtaacacattgtagaaattcctattgaaaagaagaaggtctgcaggccagaattgatagaagtcctgagatttgttccaaccagatacagtcgaagacggcaaaggggagaaatatttctgcggaagaggtactttaccgcctgacttattatgttgtgagtgatggtttgacgatgggcctggaattttcatcacgatgccatcatcgatgaattttttatgcttgcagtataaatgattggatgaacctttactctgttccattgattttatttcttcttgtgtaaatagaagacgtatcaagtggtctacatttgcgctattggatccataaaatagcgactgaaagatcgcaccgtgcttctgagattcgtcatggctaaaattgtaaagatcctggaacgattgagtataccaatccctaacggtgatgacttcttcaactttatttaatcctctgggaagagactccaattctttgatcctatgtgccaaccgtacaggcagttcatttagtaaaaagcaagaagccttgaacattaaacctggggttggatgagacccaaattgacacatttgacgcaaggacaccgctgtttgcggtgtctccgagtattgccatattttggtcaaaagagaactcggaaatttcacagccattctgctttatcggttcctgtattttaacccaagaatttcagaaataaatagagatgaaaaagaatagttcctgcctatttgagatcacctatttcaactagtatattgttcgagagaaagtgaagtgattaaaccctctactcaatggtgaaaatcaagagaacttgaatgattcttatcgaaaattcaaacaatccaaatattttatccactgcacatgaaactaaagagacgcaatcatataccacagtaagctcagtaaccttgtctgcagattgtctgaacttttggcttgcagaacaaagaatacgaaatcaaataattcatagctttaagtactcgaatgatgaaaagaaaatacaaacaaaaaaaaatcatcataataaatagcgaattaaactaatttaaacctggagaaacagcaatctcagcatattgttaattttcaattttagtaattcgatgaactactttccctagttgtttttatgcagtgctccctaagcgatcgatttttttcactgatgttcgtgatagaagttttcaaatgaacctgtagccttaacggatgaatggaagttatgaggtttgtgcgctttgaaaacccttttaagaaactcattcctatacgaaactttctctatgcttttctctcacagattgcgaaagaatcacgtcacgtgaataacgattccttcacagaagattttggtgtacattgccaattggaatagttcactgcaatgaatgtcatttcgaggtcttgtgttcggaaaatattgacactggtgcctgttaacttgatctgctggaaatgctgatgcaacaatcgaaattctactgtttttcctcctaacaaacctttttcgttcttaagtattttttctatttacgtcaaacatcgaaagtaacgccaaaattctatgagaatggattagttactagttatagaattgtgtggttatggccaaaacagaaacggatttattcttcatcggaataagacaagtaatcctttcagatagaacttcaacggtactgtaactaagcatcagaagatggagcagtaatggaaagggtgctgggaataacatatgtcatttgttggtccgtttcagtgtatccagtggtctgggccaattggaaaaatgggaatgctaatgctgtgtcatttgattatgttgtcttaaatactgtcggttattcatgcttattagcatccatggtattgcagaaactgttctgggctgaaggtactgatgaaacactgattgccccagaaatttccggatcagatctcatttattgcgggcatggtaccttattgtgcttcgttctcttatcacaatttttgttagggaatagactatggaatttctcacacactaccagaacgcatccaaagatgcatacggtgtacaagaggatgttttccatcataatgttagttgtcttggtcataacgattattttctttacagatattttaacagttggtttgtcaaatgcaacattactctcttattgcaataatttatcacttgtaaagatcacaatgtctctgataaagcatcttccccaggtgaggcacaacttccaaaggaagagtatggcaggatttcctatccaatcgacttgtatagacgtcttggggagtgtatgttcattgagtcaattagctcttcgtttagcttcaaaaccgcagggattgaccctgatgtcctttttcaccaacttcgggaagattggtattggattgatcacacttttgtttaatattgtgtacgtctctcaatggattgtttatagtttatcaccatagatttcttcaactgcttagctgaactgaaatccatacatacaaattagtgcttggttaaagtagttggatgaagttaatattaaatatcatacatttctcagaagctggagttgtaagagagttgtaaccttgcaccttgttcttcttttaatatttagcgactcaatgtgacttctgaggaaataatagtgaactttaaatgattttttcagggttggcatagaacaaaggatttcatttcataacagtccaaaagcctagctctgagtggtataatgaaatgctaagctgtaaaattagacattgggttgttataaacactttaaatggtagcttttattatatatttacaacatttccatttagccagcggaaagaataacaaaaccagatattctaaacttcgctctctgcttcagattcactgtcgctgatggcagcagagttgacgctagcagtttctataggtctttggaaatctgtggcatgtgcccaaggaatgatttcaaatacagaagcttttctattgagcttaggaacagcacttgtcgaccttggccgctgttgttgtgattctaggtccgacttcataactgacaacatggcgatgttgtccatgttttcagctgctgcactgtaatcttcttccatatgtaattcactatcctcaattgtagggaatggtagttgccagttatcatcagtgactttgaatagatgtacatttgcaacgtgctcgttttcaacacgtaatataacccatacaaatcgccttagaatctccaaagtggccattgctaacgcaatcaaagggtggcgcacataatctgtattgtttttgaccatgtaaaagacccattcgtatctgacaaccacatcaaagaccatgatgaaatagtatatgcacttctttttgctgctatattttccagatttccaattctttttgccacataagtacaagtcgtcccttaataaaaagttcttagatttcgtttgcagtaacgaccaatccataattaaatcccatatactcgtcaaagtcgagttcaaacatccaaagacgattaatagaactttgaatttctgcatttgaggccaacttttataccagtataacgacgcattgaaggagatacctaataaatacttgaaagcgtttaagaggtgagggaaccaatcatagctatcaaagtatcttctcacacattgaacaaatctccaataactaggcaaacatgacaatattccgatccacatcaatttttcataacgacacttatcctctttggagtcattaaaagttaaacaccctaaagtcgcaaattgtgacatggaatatgtcagtgaacatacaatatcacctaagaagaaatcaccgaactgaaccgggaagaatcccgaaaataccaaacggataaatgacgtgaaaatatactttcttgattggaaagtttcataccaatatggccatggttgtattacttgaaacttccaaaagaatagagcaacagcgatgcacagccacgtgatcatccacggctctagcttttcgagcatcaaactacaaaatgctaatattgaacatatgcacaggaatgttgttgcatggaaaaattgaagaggaatgtgtgtcatcccaaaatcattgttgaataacaccggtccgtttcgtgaatgaatctcaccaaacataatgaacctatagttgattttaactttataccaaataaaacaatctatgatgaatagcaatcccataaatgtgagatagtggaaactcgaccatatgggtaacaatgctgatctcacttcatcagaggaattcttagccaatatgatggtcatcaatatgactaatgttacagaaataccaagttgagcacttccaaggaacatctgaaacatagatgcgttatttctgtggatggtttgttcattaacagagtactgtaaagataaattcttgatccgctctaagttatgttttttatcttttgaagaggaagttaaggtcatggtataccatttaattgcagtttgttcccagaaagtcaaaggatcctttttcaaacggtcaacatcgttatcactgccaaggaacaagttaacattaataacctctgcatgctcaacattatccttgatgagtttcaaatactcatcgtattggctgaacataatggagtattttttagcatatggcatgaaagtcttcaattgatcttgatggagaactttatcgaacttcttaacaattttccgaaatccattaacgttcaaatctctatagtttttaagcaattggaggtataagtagaaatcgagaatcgcgtcagagagctgctgcctaatctgagataaagagagaggagaggtttcggtttgaaaagtttcctggccccttgaagctcgtttacggtcctttttagctaaaagagggtctctattcttccaagaaacgggcatagatggacataagttgtgggtcactaaccaccgcttgagatcgtaccagattttttttttgacggtatccttcaaggctatcggactaaaatttgggaatatcgatccatacgaatctggggctctcgacaaactggcgatacggtactcgtccagcgaatctaatctactacgcttatctgcttccagcacatacaaatggatctgcctctgcaatttatgatatttagctctgtatttagagagttgccattcataaaactcatcgcagttcttcaactgatctcgcacaagccaatcatcaatgaattcacgaacaatagtacgatccatggatccaacatcttgaacctttttcaatttttggaactgcttaatctttttcttaccgagtttatagttaacatacttatcgctccattcaggaactacagactctcggaggtgctcagcaaatttcatctctttgccggatacccaaggggaattagaaaattaaacagactctggattaaatcaccttcaccctcttgccctgatattgttgactcacactccaaccatattccttacacaagaagaggtgtatgtgtcgaaatttggaaagatacatgatgtgtgccttcagccaagtaaataccaactatatcccttcataaatcctttcctttctttatatgtctttttgttcgcatatatatttttcgctcaaatcaatgtcacatactgaaagcaaagcacaaacatgatgctggtagtcacgcgtatgctgatttaagtgcgaatttttagatgagtcaaatagaagagatcaatggttctgatgatataaacagagacagagatggacgatatttgacgaaaaactggttgcgttatgtacagctcgtgacagtagctactggttttatgatcttgcctcactttgttcacgtgatgtacaggatcgttcatctggcgcttcaaagcatcgctatatatagtttatataaattcctacagaggtaacacaaagcttagacgatgcatacttcgcagcccatgtggcggaattgccgttcttcctaattcctatctctgattatgacctgtcctttcaaatcattcgaacaattttatttagtttggaatttgaatttttttttttcaagctttcacgctggaaaaattccaaaaaaagttttgactcactgacgatatttaaactcatgcaacatcctaccattcaatggatacattaacatgtgtaagtagctgcgttgtacattggtaccatactgtccatctctactgaataaaaaacggtaaatcacataagaagtgctgctaaccatcatggatttagtgaatcatttgaacgacaagctactctttgccattccaaagaaaggtagattatatgagaagagtgtttctatcttaaagggctctgatatcaagttccaccggtcagcaagattggatattgcaatttccacaaatatgcctgttgcattgattttcttaccagctgccgacattccaatgtttgttggagaaggtagatgtgacctgggtattacgggagtggatcaagtcagagaaagtgaagttgatgttaatttacctattgatttacagtttgggacttgtaagcttcaggtccaggtccctgttgccggagagtatacttcaccagaacaattaattggtaagacaatcgtttccagttttgtgaatttgactaaaaaatacttcgcacaattggaaggtgtgcctgaatccgaaatggtcactagggtcaaatacgttggtggatccgtggaagcatcttgtgctttaggtgttgctgacgctatcgtagatttagtcgaatctggagaaaccatgcgcgctgctgggttgaccgctattgcaactgtattggatacaagtgcacatctaatcgaatccaaaaatccaaagggagatgttgaacttctcagaactataaaatcaagaatagaaggtgtcatgactgctcaaaagtacgtcagttgtagttataacgctcctgagaacaaattacctgaacttttaaaaattactccaggaaggagagcaccaaccatctctcaaatcaacgacagtggatgggtagcggtttcatccatgatcgaaaggaaaaacaaaggtgatattatggatgacttgaaaaaaaacggtgcagaagatatcatggtattcgaaatttctaactgtcgtgtctaaaatgattagcacttttcctcaccataattatatatataaaatcttatgcatgggcaccttattgtatccttgtgtataatgtaagttaatatagataaattgatacagcaaaaattgtgacaatagcaatatattgcatgttgtagacaatatttgaagtcagcatagtaggtatttgactcctgcctttcagccctgcatgatcgaaccagtgtccgttcttactgattgtcttcgattctgtctctgtcgttgtggcaattttgatcacgtgaatgaacgagaaaaatccagatagcttacctcaccagagacaccgctggaaagaaccagagatgaacacagaaaagcgcataatgaccgaatgcacagtagcaggttacactatacatatataatgactgattttcaagggaaaatgtgccatgttatattcttggcttttagtcagatcaaaacatggaatatccttgtaataagccagataacctgtaaagtgtggcttacctaccctagcagtacaaacatatctttttttcccataaagatagtaagaacggattttagctagtactgaaatttagcgcagagaaaaaaagtaaaaatatcgaaacttaaacaaaactcttgactgacaaaggacttcttcaaaaggaaaaacactgccaaagtaagacttcttaatccttaaaggggcgtctcacttcccgatctaccaatagtttgtttgatttatataaagcatcatatttgttgtattaagcggtttggaaattttcagaacaaacgaaagatcagcagcggagagagctcagatagggaagaacaacaagtttcggtaaagaaaggtactagtgctcatcattggtggtgttcttatagaattttcctgtgaatcaaggaaaggaattatatccttgtggataagagacataaacgaagggttttgcagtactgcatcactttgatcactggttctggtatatttacaaaagtttgaggaacagaataaacattttggaaagagaacgctagggaagttgttttgagtcaatataccccatcattttatctcatcaatatattcaaatataccatacgagttacgatcgtatttcaaaatggagtttaaccttcaacagacatgcagaccggatttaaagcgtaagttcgaagatgtagattcgaatggagtgtcagatcaacgacaggatactgatgggaagggggaaattctacgaaacaaagcttccaaggtcaatcaaaacaatgaggaaatacagcttccgagtgaaatgcctcagttcaatttctttaaattctgctaccgtcataatccagatattcaacacacttgtaaggattcgatggttttccaagatcaggtacggtcggagaagtggatggagaaaatgaaagctttggacaaggaatcagaccgagcaattatcaaacaaacgctagacaatttccagcatagcaatgataagatacgaagattaatgctggaaggaatattacagctttgttgttttccccagctatcttatattgctgatgaggtaaaacaattgattaagatcgatttcatttcaaccttaccagaggaactttctttgaaaattttaggttaccttgactgtcagtctctttgcatcgcctcgctaacatgtaagaggtggaaaacactagctgatgacgatagggtatggtaccatatgtgcgaacagcatattgatagaaaatgtccaaactgtggatggggtctacccttactccatatgaagagggcaagatacttacctgtaaatgaagcacatgtccataatcaaaacggcaatcaattccaaaatgttgcaaacggcaacgggaatgaaattggaggcggaaagtcactaatcaatcctggcaactctcccaaccaaactgttgccgctagggctaggaatagcaggtactatacgagaccctggaaagtaatatatagggaacggttccaagtggaatccaattggagaaatggaagatgtagaattcagctcttcaaaggccatatggatggggtattgtcattaaagttcaaccacagactgcttttcactgggtcatacgattcaacggtggctatatgggacacaaaatctggtaatttgattagaagactcaccgggcacacggatggtgtgaagggtatttattttgatgatcagaaaatgatcacagcttctttagacaagacaatcagagtatggaactacattacagggtcctgtatatcaacttatagaggccaccaggattctgtgctatcggtggattcatacaaaaaaatcattgtgagtgcttctgctgataaaacagttaaagtgtggcatgttgaatctaggacttgttatacgttgcggggccatacggaatgggtcaactgtgttaaactacatccaaaaagtttcacttgttacagttccagtgacgacaaaacattaagaatgtgggatatccgtactaattcgtgtattaaagttttcagaggacatgttggtcaagtgcaaaaagttattccattaacgatcaaagacacagaaaatttagtggtggatgaaaaaattgaaaaagtacccaacccagagttagaagaagattttgcagatgactgtacaggaatattcgatccgaatttgaaataccctacacatttgctttcatgttcattggataacaccatcaaactctgggaagtcagttcaggtagatgcattagaactcaatttggacatgttgaaggtgtttgggatatcgctgctgataacttcagaattgtcagtggctctcacgataagagcatcaaagtttgggatcttcaaaatggtaaatgcatacaaacttttacaggacacaaggctcctattgtatgtgtaggaattggtgacagttcatttgttagcggagacgagctgggcgaagtgaaaatgtggcattttgatgatatttgagagccctgtcgtagaaccattggcattgttgcaccgattacactatagctaatggtacagaagtgaaggaacaattgtgttcaacatcttcaaaactagcataactaaatacaaaagtttatattgtaacttatttctagtctcaactgctgcctaaatacagaggccacataatgccattctttttcgaacgaatacattactcaacgatcagtttctgaaagttttatcgtgctcggaacaatgtttaaaatcaatgtacctacctggcttcattaaccccgaaaccatcaacgttaaaaagtcaaatgtcgagcatgcgaagttgtggaattcgtcatttaattcgaccgtcgtatatgcgcggaatctaattataagatcgcaccataatgattaagatgatgagcctcgttgaaacgtaacagcgcaccgttttcttcttcgaaagccaaactaacacatcttccatttttcattgtcaacatgaccgtcttttggtttccagattctcaccaaacagcttagaaaatatcgtagtagagaaatgtgactgggaatccttgaaaagaaaaggaaaggaaataataagaaaaaaagggttgtcaccatgagcagacgttttcatgcaaggtattaatgttcctctgtttttaagacttcaatcatacataagtcgggtgagccagtggtcgaacaggtttgtattgggtacttggtgttttatgaccttcgagttaagaataaaaatagtcttggtgttttctactctgtgaggttttgttttaaattttgttgttttaacttttgatcgaagataaaccagatatataacgagctaccccagtttgctcgcattttcattgctttatcatccttaaagcatttagcatttcatattgggcaataagcgctagtgtaaacaatcacttttcgattactagcgtatcttcctgataaacgtatcaagacactagttaaataattggagataagtcagaatagattgaggctatctaaatagaagaagaaatctactatggtctagcgagatgtaccaacgagatgctgtacagaatttacaaagcggcaagtttagctctttgaattttttgaggaaaccacaaagaatttcctgccaggtcgaaacaacagccatgaacgacgctttgaaacggaacacagatctgaataaaagtaaaattattgtagataaaagtttacaggattctcaacatgatgaacacgatcctgtgggcaatgaattggcagggcggctcaacgagaaattaaatttcaataaagatgcggacccatcaaagaaggaagattgggatgttgaaacagacccattgaagaaagaagcatgggaaagcgaaacagacccaagcttaagcatgcaagactacttccctgtatcgaaaccagatgtgcctgaagttgaaatcaataacaattccaacgatgacaacgatgacgatgatgatgaaccagaagacaggtatttggatagtagaaaacttagcgctatattcaatccaccctcaatattacttacacgaagcaaatccctaccaacttctccactagaaggtagggtaagccaggaacaaagacctcctgttttcaagaggtctaaatcggttcattttgctcaaagtgagaagtttgaagttaaatactttagggaggacgaaagtccgttattcttaagaaacgaatcaggagagtacggtacgaaatctggaaagttaaggaaaagcagacgccatagaagccgagaggctgttgccaaagttaatggtgatgatgacgacgatgatatgttgaatatgaagggatcaaagaggtccttggaattggtaaatggaaacttgatccttcaagcacaaactccaaagttattacgattagatgtatttggtgtaagaaaaaatcagttccaaacgtttgccaatggtatatataattcgatgaacactccaaattctggatggtcaaattctcttcactctaataatgcacctttttggaagtatagtcatggtattaatgataatgatgataatgataataacaacaacaacaataaaaatgaagatgacgctaatactactggcatcccaaactttgatttcagctctccttttaatacaaatgatagctttaaaaaagaggcaaatttgggaacctttatttgtcatttacaagaccttagattggacacacaagggcacatgttgattggtaatgtcattgtacgaaacatatcctacgaaaagagagttattgtacgatacaccttagattcctggaaatctcaacaggatgttgaaagtgtatggataacaaaccattgtaacctgaaaagtggtacaggagctatcgatatcgatgtcttccaatttgccattgatctcggtaaaatcaatacaatcgagcacatcgaaatgtgcatactataccaaacacgagaagggtcttcatggatcgatcattgggacaacaattcgggccagaattacaaagtcagtgtccgagtaaagtaacatatacccactccgtgacactcaaatatgcaatatatatgaagacacatcaattatcagaattattatcaatatatatataatttttcataccacacaaataatgtccgagcgatacatgtcattaacagtgacactctgtgatgatatatctaatagtgtttttaaaggaaaacactatgattggattcatgcattttaaacagtggtctatggcgatcgccggcttagcgctgctaaaccctttttggttccctaatagaaactagtaaaaaaatagaacgttcgatgagggatctgcacgtgattatgtgttctaaaggtattccagtgagaaaacgttaaccagatttgtcgagaataggtgtgcctggatcggcatttcccattttgcccgttctcatctaatcctagcaacccaggaaacgattgctttttttcgattgaaagaacagctcggaatcgaaaggaacttgcaagaatgaaggaaagaaaaaacacagaagagaagggagaaagcgcccctgacttcttcttcgagattcatctcctagagtggaacaaaaactgcagtgttttacctaacctctgaactgaaatgcgatagcaggacatcggtaaaacctgcagaggaatttttcggacctgttcggagttagcgacgccattacagacctcaattaatatcctataaagtgtttggcgtatcaatggtatgatggtaaggtgataaaacaaaacattttacacgcctggaagcagatctgccaatttgatcacctggttcattgtcaatgatatttatcgcttctcataaactagggacttcaatttgctcgtaggttgtgcataatatctgtttcccttttttgattttcttctgtgcagcgtttttaatgggtatattttttcgcttttaacagtagctttcatgtagcattcggtagtgttttctttttttatttgggctcttattttcctgccctactgctgcattgtaatattgtacaagacgtgcaaagagataaaaactgactgacattataatagaagcattggcgtcgggaagcaaggaagaaaaacacacaaacactcggttatgaacgacaaatgtgtagcactgaggtgtctggcagtatttccacatctctcaccgtttatttattatagcgggttttcttttagaactgttaaattgtatcacgcttcggaagttaccgtgcatgccatttcctctctcagaaatgttatgaatgaactcgaaatagttaaaactggttccactgtctcaatcaactaggggttaataaaggcagtaagtctttcaatgagggtagttccatttgtttcacagcagtagacgctgtggtgtgtattaccattatacttgttttcagcaaacattttgcagggcatcgcatcgttttcaattttcttgatttttgtcggctttacaataagtaacaaataacaaaaatcgtcgccatggatattagaacaacataggtattagtttaccatctaaacatcgagctttccccctccatatacatcgtgtagataaagggtatgttctttccgtcccagtagttcaagaactcattcgagaattacttttcccttcattattatcatcatcttctacaggtagattccgatgctaagtaacaattacatagcagcacaaccggttcatattgtgtcgcttgggaaactcaacggaaatcaaccaaacaacactgtatcagcgtattagatcggctgataagcctatacaagaagtacgtgaatttcctagtcggtcggtatatcttttcctacctctaatttagatagttgacgttaaaatttatgtctcggatatatactttttctttcagtacgatactcccgtcccgcgcttccaccacatatttttgctttgtaatttgttaatgctttctatctggttctattaattttttttttttttaaatttctcagttaattaatagaagaaactctaagggattattaaatctctcggtttcattaagatgttttgccagattcttaggcataaaagagaaaatcacggagtacctttagagcagtacgcgcagcatgtttatggttacttttgaggaattgatattcatataaatcagattaatctgtatataaatccaagctgtgtacaacagaaatgtcccatatctcaaagggtttccaacgtcactttaaactttctttcgggattagtgaaaccaatcatcattacagttctttctgtcgtcatacgctgagggagaaaatataaaaacacatacacaaacaactaaatttcatagaagtacaatgcaagaccttgaagtattctgcactatttttgcttttatttttgtctgctaccttggatcgcataagacgactatgaacctgttgaaggcagatgtacctcgcttacaatagataacccatggtactgtgatatttcaagcgacagaacttgcaggaatttgatgccacatctttaaacaatggccaggttttctgcgatatagctataaacgcagtatgaacggttctatgttctttcaattccatctttttctatttgtgtgtccaatttaggctgttccaatagatacccttttcatgacatttatgactgaactcgaaaaataatactaatgctaataataatcataataataataataataataataataataataataatagtaacaataacactgatgataaaattaataaacaatgctcattatctaatagcactgatcacccaactaagaaattcctgttgtgttccatatcagctataccgctgatttaattatgtgttgttcaacccactttttttttaaagaaagagtgcccgaaaattaattttaatattcaaaccaaattcatcacctttattataattcaattcttctgttttctttctgaacttctttccgaggttcttctcaaatgtgcttatttcataacgggaggggaatgcatttgtgtgtgctataacaatgcatatgctcttaattcgcggctatgaaagtcaaaatcatgaaaaacaacaacgtatgcaaagtcctacttttgatgactcgtcgatacaatttcaaacaagagtgatatcggattatacactcgtacatttgttccgttttctcaactgaggagatcagctttacaaatctccgtggatacatccggtgcgcctttgcttcgctttttacacatgccttaatgacgttattccacgacgtttcaacacatgataatgccttttttttgatattcaaacctatatatactttgatatataatatgattcaagatctctgtccccatttagataaaattattagtttcccatagtgaatcctgacaaatgtttggatagtactagcacataatgtcaaaatgcaaaaaaacagctgtaaatctatagcgccgatatttacatcagtttttttggagattgttcagtttctatatgcaggttgcaaagcatgtttatagtcactctaatggatgttatttgtttttattatatatatatatgacttaccacaggttctcaaaatatctcgcatgagtaccaaacgaaattatgaccacacatttttgaataaatcgtcatccaatgacaaacttgatccacttctgctatcatcaactgcacgcggcaccgcccatggatttgatgtcaactttcctccgcttgataaactattgctagtactcatgtttttggtaggaaggtgaagtgatgattgagatggagattgtgattgcgaatggggagacgtagatttgcgatttgcgtacagtgaaagaatggatttctttaaatctggtctatccggtggtctgtagacattcgtgtttgtagcagaaggtttctcagaggatatttgaggtacgtttttgtctgtaaccacagaattcagattcagccccagatccaaatctagggagcgaggcgaatctgaagaaggactatttctcactgccgctgctttctgggccacacgatctttagcttcagcagtatgcttgctagacttaacgtccacaatgggatcatcaccaacccacttttttaattcatatttagtcctaataaattgtccaattttgctttggtctggtacgtaagtgcctccaccaagtttattctcgtaatattcgttgaatttcttattatttccgaattccaataccgcttccaaatgttcctcggtccatgtatccaaatcaacactcttcactttactaatgtgtgtacccatagatctgtgaaaccctgcacatttaatgcacacgaaaacacccagtgaccacgaagcccaacgtggatgagttgcaactttacaatcaccacatctgttattttctggatcacgaagcaaggtagtcaatacttttttcacctccacactggtcattcttgaatagcagcaattgacctaatattattcttctatcctgttgaaattgtttaaaatccagtccgaaaagatttaaattataatttcaattcttatgacggcctttaatcagtcaacttgaataccttcgttacgagtacaccaataatcaaaaaaaaaaaaaaaccaaggtgcacaatatggcaataaaagaagggtttcaattggagatataggctctcagtttcttccaaaacagctccagaacctcagtttgcgaaacaggatccttaacagaattagcagcaaattactaacttcatctgtaaagtgcataaacaagaaaagaatgattgtctattgtttaattttgatgatacgcttttttccactttcctaactcaaatcccataacaaaatttcgcatgttaaattcggcaatctactcatctaattgcaaaaaaacgctttttagttttgttgcaacacacaaaagaaacgaaaagaaaaaacgcattctttgattttattgtgcgattacaccttctttatagtccatggaacagacatatgttttttttatcgatttgcatcgatcctttttttcctctcaacatacataagattcttttttatttaagaaaagtatttaatttcgcaacttatgtctaccttttataatgtagttgaaggaggaagactggtgagttccaagactggattgataacttatatgcagagcacattttgccgtgagtgcatactgtgtttgtgtctgttatttattttacatctgttcgagtactattatacaggcaacaggcattcctccactcatcacagatctttttcttttccatttgttaccgtccaattgttacgtatatcaccagctgtatctccaactagagaatataaaggaatcactgtaattactgatattattaccagggggcccattggatgagacattgattgcttttactgttgttttcaagtttattattgctagctctgctatatcgcttccacgaggaacagtactatcaactagattgacccattcaattttttttttttttttgggttcaatattataacaattgttttgtttccgttttgttgctttcgactaatcgatcaacagtccgtcactatatattcgtggaagttcaattgattggtgattatttttgtgtttctgcttagattttctgagaattttattctttttttggtacagcattcatagcatttcatttatttaaaatgagagacccgctaataactatggatgaagtagcacgacatagttcgcggtccgactgttggaccgtgattcatggcaaagtgtacgatataaccagtttccttcacaagcatccaggaggtgctcaagttcttttgaaatacgcaggtaaagactcaactctgcaattcgatgacattggtcattctatggaatccctagcatatgacttagaccctggtgctttaaagggaacattatatttacctaattccaaatcaaatcacaacagcgacaacgaagatgattcttcacttccgtatttcttgagtgcaagcttcctgccgtcaagtttactttggatcactagcatttatcaagcaataagaaaattctttttgctggaaagagacactaggatatggttgttcagtacaataattttcttctgtgtgcttacattaggatttattcactggggtcatgatcataatatcattgataataatgattatggagttcccgcttggatggattgacgcaactaaaaccaaagtctacgaactcttgaaaatgcggagccaaccgcaaagataaaacattcagccagttattcgcgaaattcacttcaattattaaactttttttgattaagcttctatatgggaagccgcatatcttataatggatcaattctggcaaacagtgccaatccatttaataatattcgagtacccacaaactacaacgttactataccatagctttctcatttcctctcattttgtttcatcgaatcattatcagtgacctttctaatgttaggagctattggacgtttcgattctgttcctacttcattccatcattgcattatattttccactacctttgtcacttcaattcaaaacttcttaaagttagccaagctgaaaagcgataaaacgcgaatcaaactataacacagctattacaatacgtacatccgcttaagttataggtataacatattgaaattacaaataaaaatcaggagaattaactcacaattttatgttgttctttactgttccattactatttattcataaccattatcataactccatttcattattttgtttattctttttcaatgctagtgtagcccacacttgctccatctaataaattttgtttatcatgcagcatcagcgaacaatttccattgcatgctcttgaatcaccccgcttaaagggcatatacctgtctaccatatagttcccattttcgtaaatcacgtgaaaatggcataattatcccatcaattttccatcgaacctcacagttctagaaaatatattgtgaaaaactagaaagattttgacaaaaagtaattgagtcatttggtttgaatgaaattcatataaataaaggaagctccgacaaaaacccattagcacattgtcctcagctgtgtgtttacaagactgctataccctttggaagtagtaacaggccttttctataaaataacttaaagtatcgattacgtgatgattgaaactagtaactgggttgtacagaaatttggtggtaccagtattggtaaattttccaagcagattgtaaatgaaatcatcaaagtgtactctcaggaatacgacaataacgtggctgtcgtgtgttctgctaggtcttcgtacactaaagctgaaggtactacttccagattattattggcatgtgatctagcgtcaaacaacaactatgaatataagaacgttcttgatttagtcgagagagatcatgtcgcaaatgcagaagagtctgtcaaggatattaccatccaagagactttaattgaggataccaagagagaaataaatattgtcaggagatatctggatgcctctcaagtcttgggtgaggtgtctacaagaactttggatttagttatgtcattgggtgagaaactatcctgtttgtatgtgactgctctttgtcaggataatggtgtcaatgcgagatatgtggatctctcttttattgttccaagtgattacgaatgtaaggaaggtactctggataatagtttctacaccttcctcgtcaccgcttttagagagaagctatcgccgatcttaaaagaaaccgagaatggcaccaagatcattcctgtcattactgggttctttggagtcgttccaatgggtctacttaatggtgttggtagaggatatactgatctatgcgccgccttgatcgccgtcgcactaaatgctgacgaattacaagtatggaaagaagttgatggtatcttcaccgccgatccaagaaaagtaccccaagcaagactgttagacacagttacacccgacgaagctgctgagttaacttactacggttcagaagtcattcatccattcaccatggaacaggttatcagaactcacataccgattagaattaaaaacgtccaaaaccctaagggtaacggtactattatttacccaagcgatcaagccaagaagggtgaatccacacctccacatccacctgtagcgttaacatcctctatcttcgaatccaaaaagaaaggcgctacggccatcactactaaatctgatattgttgtggttaatatacattctaataagaagacgttatctcatgggttcttggcagaaatgttctctacgttggataaatataaactagttgtggacttgatttctacttctgaggtccacgtctctatggcccttcctgtacctgattcagattccctaaaggctttacggtgtgctgttgaagagttaaagagactaggtacagtcgatgttattaagaaaatggcaattgtctctctggtcggtaagcagatgaagcaatttgttggtattgctggtactatgtttacaaccttagctgaacaacatattaatattgaaatgatttctcaaggtgctaatgaaattaatatctcttgtgtcattgatgagagcaatgcagtgagagctcttcagtctattcatgcaaaattattagattctccgcagaatgaaaattttgaatcagcagtgaatgaaaggttggaacaaatcaagcaaatgtctttatagatgttgattagatcaatcaatagaccgaaaaaaataaagaaaggaaactattttccatagaaagaagtagtttatgatgttcttgtgataggcatttttgcacaaagatgttctttaacatagtttaataggctcttaacagtacgtttggatgatataggtgccggagctagagtcttttaagtaatgatacaatatagaaaaaaaaaattaccgacattctcccgtcttttataatgaatttacaggttggataaagattttacttacatcataatactgaaccagcgatatgtattctgattgtcttaaaatacaaagatttggtctcccatcttagaaataggtttagctttctcgtaacctaaagtgacagcatttctcttaatagatgaaaccataggaggcggaccgcacaccaaaagttggacgccttcagctggagctggaagacgttctttcatagtatcaacggtgatatacccaacaccaccagtccaagcttctggagccttatctaacaagtaataaaccttgaattgatctggttttctttcaacaaatgcgtccaattccttcttcaaaaggatatcctcctcagtttgattaccatagactaaagataccttggttttatcggaatcgttggcaaaaattgatttcataatttgatacattggagcaataccagtaccaccagcgatcataccgatttcttcattcatgttaggttggtaatggtagaaaccctttgggccacgtaccttaattttgtcaccaatgttgagctgtgcaaaatgctttgaaatgttacccttttcgtaggacttaattaaaagttcaaagtgaccgacggcgtccgagtccaacgaagttggtgtataagaccttaaaatatccttgccattgatgtttgcttgaacagaaatatgttgaccaattggaagccctaatacctgtgtagactttggtaaaccaaatctgtaaatagcagtattatgagtcaacactgtctttgccaccaatggaaattcctgtaacttctccttatctagcactggcttatccttctttgattggtattccaaaacaacggcaatgatagtgcacagtaacacaaaggtcgcagtgaaaatgaacttcccaggaaccatatttgaggttaggctaaccgtcttattttaaagtatacactatatcttttcaaatataacaactggtacaatataagagcgtttattgcccaatgatcaatgctatcgtaccttgctcatcagattgaatcctcacatccaaaaaaaatcttattttccatgttggccttcattcagaaaggaaacatttaaaccacactaaagagagggtaaggctaaaaaactacttaggaaagaatgatgggatggacagaatagagtgcagtaacctgcgctagcttccctgcataatagtacttaagatattgaggattaagtgtgttcaaattttattattttattctttagctccgttattagttcttttttgctctgataattgattggtttatatttgatgttagatgacgagaggtatttgaccaagttctcaatatcttccgatgatatcgattgaatatgatcagagttcaatagccattcacatgtctttcccataaccgattcaaattgcgggaaagtaaatttttttggaacttttgtctgatgttcaatttctaccacatttagttgggtagttatgtctcttaatgttaggaaattacctccaacgataaacgagtcctcaggcgtatacacggcatgaatgtatccacacggaatcatgaataaattaccctcggtcaattccattgcgatacctgcttctagctgatctcctaagaaaatgtcattctgattatcgttgtcacaccattctctgtatttcttcaagttgtaatctgtcggtgggaataagatgaacttctttgatcccgagattacattataatagacactagttccagcaaaatccaaatgaaagtctgtatatgcgttacccacggacattaatatgtatttggtaactttcggccgttcgatgtcggtctctgtacgtccaaaattccaaactatatcaaccaaatcgttattattcacagcattgggacgtcgtatcccatctttgaaactttctacatggcttacctccagggatataacatttctaatacgatctctatcggaagggctagtatgagaatagtactcgttccattgagaaagtgtccatttctcattcatttgagtctgaacatccataacgtctaatggataatcatcccccatgatttttgttagatattccacgttaagtttaacatgatctttcgaatcgacaagacctagttcattagctgaaatcacatacataccactatcggcaggatcggatactcttaatggtactttaatgatttggaaatcagattccaattctgacgagctgatcgccttaggatctttccacttttcaaagcatgcgaggaaggcttgcgtatgtggatgctcatgctttaatcgtttatcattaccttcatttagcgcaatgtaatctataggtcttttatttctaagtctgtttctctttgtaaaagcaatatcttctgtccccactgacacaccgttcaacttcaacaacgcacacttcgattcatcatgtagtgtgcatttaaaagattcaacgtgcttctctttaaaagctaataattgtgaaggattctctaacttcggaaccacaaattgaataggcacacacgttaagtgacaccaaccgtcacagaattcacaacctacccatattggctgacctttatcctccgaatcatcctttttgcaaaaatgacatttcactgtaccactagtcataatcaacaaagcaaaaaggtaactaaacagtgtaatttaattctgatcgattcaagataaaggcaacaaatatgtctgcttagctttatgcctctctttattccttccttttatctgaattctgtgttgaatttcgcttgattccaaacgaaatatcaattatcaaaaaaaactaccgtcataaaccactttaagacaaggagaaacaagtaacacatatttcaagctataattgctagtacagaatctcgctcgaattaaaacttgctacaagtagctacaggacaaatagtacgcgagcatcgaggaatctcgctctttcattaccgcgctcttcaggcgtttttcctctcctctgattcttaaaaaatcatgagtagacacaagggcaggtccggaacagtgccgtcaaacacattatcagcatatgataacaatagagctatagtagataattctacttcaaaaaaaatcaataattctaagcctcgtcccataaactatgacctatcaagatttacaatacctaaatccaaagttacgaccatacttgatgacgatgatctcaaagaagagacaactagttctactctgcggaatggagagagcagtaccgctgctaatagatcattgttagagtcacataatgatatgccaggtattcttggtagcaatactcaccaacaaccaaatgaaataacagaaaattttacaacagagggcacagtcaaaattgtcagcaaagcatcaaaagaccctgtcttccagctgactacagcattaagtgttactctttcaaggggcaaagatatgtcaagcccagtgttacttttccaattcatgaagaagtccaaacccatacaagggttctcgtttaccttaaatgatcaaacagtgaggttttggtatggcttcaaaggtgaaggtttcggcgtaatattccccaatgaaaaacaattcttgttgccaaatgtagatagaatcaaaacgagatgtctttcttggatgggttcattaagttcttcagagtctgcaaagtttttacagctcatggaggcctttgaaagagaaatgtgttttacgggtgtagatgtatcgtcagaccgaatattcaaagtcaagaaaagggaaattgatgcaatgcttaatgaatataaggcttctcctagtactggaacaaatcaaatggtcctttttcctgatcggtacaaatcggataaactcttcaataagtgccccaactcgtcactgaactctctacatagaggcaaacgcgggtctgggaatggcacagttatacagcttcccgactacaaaccgctgacttcatatcagaaccaaacgccagacgagacagtatcgcaagagagtttctatgggaatcagtctacctctgaaaaaaccactgaacatccaccattcatttcttacgtttctaatttgaggcgtgtcacaaggtccatatctgataacaaaaaacatggcgatgtacatcatacatctgatgaactcatggaaagtgaaaacccggagttatttgaacccaccttatcttatactttcaatgatggttccaaactctcggtaactaaccaggacttcaaatgtttgtacaataatgattggataaatgatacaattttggactttttcctaaagttttatattgaagaatcgataagcgacaacgtaatatcgcgatccgaagtctacttattttcttctttcttctacactaagcttgtaagtacagaagcaagcaaatatgaaaacgtaaagaaatgggtaattaactcagatctgttttccaagaaatacgtcgtagttccagtgaatatgaattatcattggttcggatgcataattgtaaatttggacaagttgaaggtagccatagaagagcagttaaccaaaaagcttacatcaaaaggaggtaatcttaaatcaccttcgctctcaaaaactgaggatgaccgaaactcaaatatagcaagtgctcctacgaatgtcactgcagataatatcgagttacctactgtattccttttagtctttgattctctacgacaaacgcattcaagattaatggacgctgtgaaagaatttattatttcatacggcagagacgttcataattacgatattcaaagagaaaagctcaaagtaagaacatgccttgtaccacagcaacccaatatgagtgattgtggtgtccatgtgatattaaatactaagaaattttttgaaaaaccgaaagaaacgctcgatttgtggtttgcaaagtcgtcctacaaccactctaaactggtaaacgaattctttgaaaagaaagaacgccgttttgcaaggaaaaccttaagagatgtcttattacttctccaaaagcaacaaatagccgcccatgggatatcattgggccaagaaaagaatgaaagcatagaagagaatcatagtgatttggagattatagaagattttgaggcaaaagagatggaaaccgacactatggaagaaacaggagagaccaatcatccacctaatcataataatatgcaatgcactccaatcgaggcaaatctgaatagcaaagcaaaagcgcctacaccaaatgtcgagacttccatgtacttcttgaaatccacaccatcaatcgaaagatgtactccaaacaatgataataagcatgaggaccaactgattatagttccagaatcatcccaaaatagtgttgcaaataaagatattaatctcggaaataaatctgaaagagatttttatcagtctgcgcttttaagtgatgatgaccatcgaaatgaatcagattcatgtgccgatatgatttcaagtcaaccaccagatagggcaaactttagggatcgatgtcctacggcggaattggatgacattgaagattcaacttctgataatgaaaagtccaaggtttatgacatttcttgttcacaacagagatgtaatgtgccagtttcacctgggaagctgttgaatgagaagctgaaaactttgagtaccaacactgcggttacaagtgatgctaaatattcgaattgtaggaaatatcagaccgtttcttcgttgatcagacagtcacgtgcaattgtggataaaacgagagattctgactctagaattacacgctctgatgatgaaaatgaatgtggcggaaaatctactgactctataaggaaacaactctccaatgaactgcgagaatcaaataccgtgagtttgggtaaatcatcgtcatctgacggtggcaaactacatcaacctaacagctgtagtccttctaaaagctcctctcttccgtcagaggatttggttgaagaaattgtggaagtacaacctattcttgagaaagttcattccaacagaaaggataacaaaaggaaaattgtccatctcttcagcaataaagaaaataaatcttacggcaaaaatcccaaaatacccaaagccagctttttcgatcaatttgcatctaaatagctacatatcctgttttccatcattttacttcccagtcgtaagtaataaattttaatggtaagactagataaaataattcattgaataaaaaaatttcgctaataaatctataaagacatcttgactgatcaaactattcttcaaagttttttagtatccttcctcttgcatacacttcgtctctcacactttgagataaagaattgtaaagcgacttggataaaattgagctcacagttaggaacgccgaggaaatcgtcactacatcaacgtagtagaatgccttttgaaatgtagtcataagggaatgatctgccgagacagaaggctgtatgaaaatgaaataaacaaatggtgcccatgaagaggtgtaaacttgtttgtgggtaaggaattcaaacatagaaaaactatattgcagagcaaaaggtaccgcaatcattgcaacgaggtacacaaagcatatatccgtgaccctaatgagtaatcttctgaatcctaatgttttattccgcttcaaactgcactgtaccgcgatgtacgccactgctgctacttgacaaaacaatagagcagctattaatgagtaagctgaatagccgctgtattctgattttgatgcgaggttcgaaaggaatggaacaaacgatatatcagggcttgtgttttcgagaacgtcgcctttccagtagaaatctttgaagtaggtgaatatgaagaccgaatgataattgatattcaacttgaaaatgattggcataaagtagaatgtaaagactggatacaccattgttacaaagcctttgatcaagttccaaacatcaccttcagcaatttccggtactctaaattcattggctactggattttcatcattttcgggaatattatcatcattgtgaactatatgctgatgattatcgtcgtttggaccgttatttggaacatccccattgtgttcggcattaacctccaatattctgtcatttagatggatattatttaatagatgtgcgtggtaggatgacaaagcgagagacaaaagtatcataccagaagaaacggaaagaagatttaatggttttacactttcatagagttcattttgaaatttcattgctggggggataaccgcattcaacaataattgcaatccagtgataatgggaagcccagcaaaatttgagattaataacacagcagtaaacaaaagggaagcaaagatccatatgaagacaattaacagcgaataagtgaaagtaaaatgcggagggacataaactaccttatattcatcaaattccgtgggctgtttttctaggtagccaaattctccggcatttcgtttctgtctttctttgattttttcgatatccaatggctttagaagtttgtcatccttagtaactgggacgaacaacaattgtgcatatttttttgatattatgtcgctcgcaggtacgcgcatcatggtgccatcggggacaaaatatgcgtgaacatcaggaatagttttgaaaagagtataggtttcatcgagcgattttggatgagagtataattctaggttggacagttttgccttgtttgggacgaaccatttatagtaaaagttcctataaataacatgtcctctctcagttggtgaatcttttcctaagatgaaagaggaaagtcttagttttctgcagcatatattgaatacaaagacccaatattgtctaacataagcatcaataactctattcttcgagagaatgagatacgttccagcaatgactgcaatagaaaacatagaatttggttttatgagagttgacaatccatgcttcataggtaaaagttccgaatgtaaaatgtaaggaaacaaaagtctcgtatgaaatccaaaacctactaaaatgaatgctgtatagattgccatcgacaatgcaagtctggagagttgaagtttcattgggtatatcaaagaatcctgtaatagcttaatattaggatcatctggtgatcttatgaagaaaagaacacccggtctgataatatattgtcttaccatgccgacatattgagcaaaatgatacatataaacagtaccaatcgcccaataaataataaatgtcataggcggccaaaaggaacaaaaactcggtacgaaagtcaagctgctctgtggtaataatagcggtgagatcagtgacacatcaatcaaaaaccccgctaaaatcggaaatccggcaagttcaagtgtaaacaaccctagcactttcaatgtgcacttgatgatataggaaaacttgaaaatcgttcttttcaaagaattctttagaggtagcttcttggaatgccctctagataacagttctggtatacagcaacaaagaactatgaaagtcgcatatgtactggctggcgccaacattcgtaccagcatcgtatgttttgctgtgcctttcatgtatccctgatagtacgatactattggcattaaaactgtcccattaatccaattttcaacgtaggataccaaagaaaaagtttctataagcttttgattgtattctgggatatttaacctctctgctgacactattactccattcagcattataatcacaactctaaaataaatgaaattcaacagatatccgacaagtgtggctaaagcgtatgaaatgaaaagatatccaccaatgacagaaaagactaaggaaaagtagctcggtaaatatttgtaatcaagatttaaattcaagatagccgtaggttgaccatcttcattctctagtacaaccgctggttgagcatttattccatcttcttgtacttctccttcaacaggctgaggtcgtccgagttgagcatccaaccgcccatcgagttctctttgtgcaaagtgtctttccataatggattgtgaattaaaagtacagtcgattaataactcagctaattggtaatgatatgaatatgttgcagaagaaatatgatattgtgatcagaagaaaagagtaatgcagggatctaatgcggaaaactcaagttgaagattcagtttctatgatataattattcaacttcaacagctatacaattgtagcaaagattaaatattgttaacctgttgtacttagttgtgaaacgagatcagtcgacgatgtatatactgattgtctgcgcccatgttgaaatttccttcttcaaatttcaatttccattataagccgggtaataccaaattcatctttgagaatctaatgggctagcatgttttactaaagcaagtgaatgatttgatgggacaacgagggaattatattgtatatagaagtttatttcgaactggagtgaaggctgatgcaatgtttcaatatgaagattatcaatatcgtaaatatttaaatgggggattatagttagttggcaagctgaggctcatcattattttcgtttacgatgaaattgttctgttcttgttcgtcttctgaagtatcatcttcatttggatcgtcttgtcgttgtctattgagggcatttatgagcatgcttatatcatttggatccatatttggaaatctttctcttaatgactgcatggccagctcttgttttgaaaatcttggtccaatcttatgcaagatcatcttattgaaaattggctctctgactaccatatcatattgtaaatatgcgatagcatgcacgatcaaaaccatcagaatttgtaacaacgaaaatctgtaatttatcactagttgatataaaatatccgtagttgttggattttttggtatgtttctttcaaagccataaatcaaattgatataccatttgttatttgaaggaaatgaaaaatcatccacagtagccgtatatagcttcccccagatattccaggacaggggaattccaatgaagaaaaggaacgcaatcaatgtgaatttgaaatagtgatttaatttgccaaagattttgaaaacgctatgtttcagaagaagtagaagtgggatcttctctggcattgattcatcatacaaagtttggaacgcgattggatgattacaaatcgaacataccatccctgcaccaggttttgtaacatcgacatgttttgactgtagccattcgatcaaacataattgatgaatatatttgatggagcctttgcacttgcatggatggaacaacggattatcggacgttccttccagcatacaaatacggcaagttggaaaattccccgcatgcttatcttcgtagttgtggtctccaccattcatactggatgacattttttatcaattagtaaaccggtactgcgaagttcaaatttgaaacttggataaaaaaatcttgtgtctaagaggtcgtactatggtttcaactgtgaaaaatcaaacctgcaaagagatgattgggctggttattatatacaagagaagcaggctactctgagctgtttaagtttctctatgccataagaattgatcgttatgcgtataagttttcaaatttgaattgcattgaaattgtctgtaaattacagacataaaaaaaaagaagtttaaaaatctaggattcattcataaaatagacaaaaatggaaagccctgtggggggctcgaacccccaaccttgtgattaagagtcacacgcgctaccgattgcgccaacaaggctatgtaaatttgtagattctgactcgccgtatggtcaactacattgtccaagtgtgatcatatatgctcattccttccttccttccttctttaagtgatttggtaaaatgttgtatcgagtaagagatcttagagttgcatgtgcgtcatattgtgttagatacgttcatttgtaatagtatgtgaaggttttgcttttcctttcgcatcatatttcatcaaccgaatttaataacacaaaagcagtcaagtttcttaagatgtcaatttatatagcataacgtagaattataacatagaatcggcataaataccaaccattatgctaaggcgtgatcctacagttttatccttgacttccgatgatatttccgagctacaagaacatttagaagagtacaagctccaacgcgagatacagacgcaacatcaagatcttttgaaatcatctgcaaaaatgagtagattagcagagatagaaggcatttctaacccaagtgcgacacggaatgatattttatcacactcattgcataagatgacgccacctcagcgatataaacagtctgcatcatcagatcctcgattcattgaacaaaatagtacacagagtacacaggatcctccaaatcccttttacacgtacaatcacaatgataactgacgtcctaatgtgattggtgaagtgcctatattggctatcggccctgtatctactcccgttagttattattgcaaagtcattatattatgtaattccccagtacatattatatatatgtatgcgtttaagttaccaatctttatcaactcacaaactgcgatgaaggtattctttgaacagtttcctcttagcatggatgtcaacaaatgaaggaaggtagtttatttccccataaggatcattgtttatcactacatctgtactggacgccttgttcaattcgataggtttaagatactcatctgtctcaattattcgttcctccccacgaatactaaggtacttaagcttggattgactgataaatgtacccaaaataaagaataataacccgcatagtgcctccaattttacgtcatctggtaaacctggagttttagcgtctgggttctctagaatgatatgtttcacaatctgatgaaattcatagctggacacaccagaatgaataatctgtatccacgctataaagtagaatgatttggaaagtattgacattgttgattccaagataaaacggtgaatagtagtatttaagtaaagtaacaaagcctatttatgttagatctgtccagttgaaccttatactacctatattttgtttggtattcttgaataacctttccgtttttttttttttctgagtgttatagagtttccgacaagagaaactatctaggtaaaaaagagagatagcatgcagtactgacacacagccgcatgattgaggagagcttaggttatcgatagccatgtaataggttttatgtattatgtttaacacaattcaccaaaaaaaaaaataaactgatttaaatgcactcgcaggaatttcatttcgtaggatccccaataagattagattggtgatgaaacaatggggtctgcagggtgcggaggcgaatgaactgtttcatcctgagtgaattcctcaattggttcaagaacttcatcatattgttggggtactggttcttggtttaatttggctgcaggatggctctcagcgttatttttcggttcatcttcgaaaaccgtttcgcttactacactctcaaataatggccctaatttctcttggtttaacccaattcttgtagttaaatcgctatagtttagaattccaagtttgatgaggcctttcaatttaatggtatagatacaaagctccttctctggatctccatcaacatcgactaagttgacagcgccataatttacatcttcatcagccactcgatctagagttattcccaaaaattttccaagacaactctcaaggtagaggaaaactttgtggcaaataccagttagatcttcgttagagataactgaatattcttgccttaacgcccttatccaatcggaatccttttctgacaaatcgagctcaaacattttgaatgcaatgataatatctaacaatggagagagtattacatgaagcacatggaatttcttgtcgtgttgtatttcagggttagaatcgatctttgaagaaagattcagcaattcgactaataccgttctaatttgattcagcgtagtatgtgaaacagctataggttcttcattatttttgataacatctctccaagttgctaaattccaagtaactattgaggtgaaaagcttaaaatctaggacagatatggcatccgaatcaatctttggtagtaattcactcaacggcttcaagaatttttcaacaatgtcatccaaaagcgtttctgaaatttcaattgcgaactccttacccaaaattacaagtttgttaacatattgcagatataatgttgttattgaattatcagattttatgtcaaatgattccataaacttcttgaatgataatgtcacgttaatcagacatgacttccaataaccagttacctctggtatttgaagggatgccaaatatggaattaaactcttataggttttagtaatggcatttgcgttgctcaaaaccactggagagctttcaaatcgttttgttattgttttattgatattaaaaatgacatcctttgattcactggaattccattcttctgtgtttaatagctgtattacatttagtagttgagtatatatctgatcagaatcaagattcattttcttgaaaagatcttctaactctggaagaattaactgtgtcacggcttgtctgtcctggcctttgttgtactgtatgccgcctgtgcataagccgcccaacacagtggcataaaataggacattgttatcagtttctggtaggaacaatttgatatcacccagatcattggaaaaatcatctgcatcagcatgaattgtgctgccatcgaaatttccctcttcatagagtagttttgatatagtttcaattaagttgtaaaacttgggggataaaaattccgccgcttgctgtaagagtttgattttgtccggtggtacttttgcataaccttctaaattactagtggagttgatatgatttaacaatgaattgtgtaataatctcattaacacacccaccttaacaaactgctcttccgttaccgaaattaccggaaccttaaacctttcattgtttattagaaactcttccgttttttcagaaacaatgtttgccaagaatttggtaacctcgttcaagaatttaacgtcccttgacgaagaagatacttttacttcatgatcaaaaaagatcaagctaatgatgtctattatttcatggtcatccagataacccaacccattaatcgacgaaagtacttgaactgaggttaatcttacttgaatatcgatgtctctgccagctatttctaacattcgatctttgaatctttcgaaaaattgtcttagggcagcgttatcgacagtatttttgtttctcttattggagaacttaattaggtcatgaagggaccttataacttgtaaccggactgaattactgctatcagatagcaaccaaccgaagtatttgaggaaggttaccttaaaaaagtagtctggattgttttcaatccaatctaacaagtaggatatcgcaagggatctgatattttcatctacatctttgaaacgatgaacaaaacagagctttattatgttatcaatagtgttttctatcacagttttcgtagcttcagcatcagaaatagaagattctagcgtctccatagttttggacttgggctttttcttttttctctccagtgtcaactgtttcctcagtttaaataacacctctgcttctaagctggcagaagctcgtgcgagagaatcttggaaacagaagatggctttagctgaaacatatcgcaaacatcgtatttttgatactgacatggaaggtatccatgtaagtaagtcaataattaatggatttgtttcgatcacaatctcgtcactttcttctttttcattctcaacatatatcatctctttctcaatggctaggtccattaatgtggtcatgaaaatgttaaaattatcattcaaaggacggaactttgccttcttgtgtgttgccgatagtaataaatggaactcatgttttttttgctcatggaacataatttgtatttcccctattgtttcattcgaagagtcattattagctacatcgtgttcaccaatatgagtgaaacatccagaacaatctaataagaaatttatgagattcgctaagctgacatttcggttatctatataggaatccaaccagtcactggcaagttcttcgcaagaaaaatcgtcggagctgcttagaatttcaaaaagctctgtgggtttgaattcattctgcaatgatatgtatgcttcctgttcttttcttgaaacagcactggatatattattagatggtcggcctttctcgttttgttttaatttcgttctcttgttgcttgcaacgcgcctacctccggaatttggtctttttctggagccaggggcaacatagtcgtcatcattggcgtcatcgtcttcttctgaactactagaaccttgtgataaagcttcttcttctttctgattatccgtgttttcgatatttattcgatcgtcggtgacaatggatcctatagtttcgtgctcagagtccgattctgatccagattgttcactataagaggatttggtccttatcctggttgaccttctcactggcataggtagacagtggaacgaggctgaatggttctagtaagtgactgttgttgttaatgtactatgagtgagagctgtttttttccttgatttgttgttcgtcgcctctttttttttactttcatacatatagttttttagatttacgcgacgcgtttttttactcgaatccatgtaaaatgtaagtattatattttggcctaataacggcagctgtgttaagaagtgaaacaacagtgttacattgttaaatcacagacctatatcaatttctctatctaaagttaaatgacctgttttacgaagacatccatgaactttatctaagagcaattttcattcaaatgagatgacttttgtatgctttcatttgaggctaccaaagcatgggaagagagtgtgttttgaagcaatcgtcgtaatcgatttaaaccgacagactgtattacatcctgagaaaaaaaagaagttagaggctaaataaattaaagaagagaaatagcacgaggtttaaatagtaattattgtagtttgatgaatatgtgttcagaagatttttactggatagaagaagttgagcaaaaagcagtgtatattagcgtgaaaggaagaaaaatcaattagaaggagaataggtaaagaagaaatagcataaaattaaccatcaacgtttccagtaagtggttgcacgtcttaaagttgcgacgagtccgtgtatcggattatatgaagatggatatttggcattttgatcagagtagcttgcctgtagtagagtttgttgagattgttgttcgtcaatatcatctaccaaaatatcatcaattgtaccttgtgttactctcggatctaattccacgtcctcagatgagcttaattcacctcttgaagttacgtgtatgtaatcttgttcgctacttggcctagtgattgctaactgatcgatctgaagatctgaaggtgacatagaagatctaaaaggttttaaatccaattccacatcttccattacaatatcagcaaccatttcttcagtctccaaccaagccttgcaatggattaaattgttttcgtgacccatatcatctatatatttatcgaaacagctcaaagctttccaatgttcgttgttgacaacgaacttacagacgaacgtttcactatagccatcgtacggcaaatgggcaataaagtagcctgtgcttgaatcataattcaaggtgtactgaccaggattccaattatcgaaatccccggtgataataacatgatcatctttagtaaatccacatgaagcgggatcaattctaagacaaagctcttgacaattttcggacattattttcaatggtaaagttttgatggatacggtggctctggaaaccgaatgagcaaagtccttgtagaccctcttatcgtaaatatttctttgagtagtttagtatttttttatttgtctttcagggacaagcgtctaattttttcaggatcaaaaatatatatgacagcgagcaacccttgaaagaaaatcagtagcagatataagtcctaaatactgtacagttctttggctgacaaagtaatgataactgctttataccgttgatgaatggatacagtaaactgcttcgtgagctttattatattttctgaggcctttgtacaaatgtgataatattatcccagaaataatgaggttcaattattggcttatacttttccccctaaaacgtgaaaacagtactgacgactttcgatctctaaagcttttagtagcaactgatctgatactatctatcgggaataaagcaaagaatttaatggcaagcgcagggtgaaaataccagttcctgtaccggtcagatcctaaaataaactgtttcctctaaagtaaacatgcatcccttttatataatgaggcctgaattctgattcgatttttgatgttttgattttttcactagcggtggcactgaaagcgtaatgattaaatgaaacagaaagaatgtgacaccgttgtcaatgacaacgaaatagtatgccggaaatgaaagagacaaaattcgtaggttattgaggtcaatttcttacgaaaaccgattttctgtacgtgtaggtcaagatgagttaccacacacaatcaattttttgattgtgagtggttataagtatatatatatatatatatatatatatatatatatatatgttgcttcttcatcgtttctatctcattgccttcctaacttgcagtgcggtaaatctgtgcggtagtggttcatgatatgtaggaaaaaaaaggaaattcaaaatgcgaaattacaaaaagaataacactctttttgtagatcactcatattgaacctcatgatgtgatttttaagtaatacagaaatgtatcagtcgttcgacgccgtataactcgatccaaggtgtttcttatcaagtaaaaaaaacattagtactgtttatgagagcttctgacatgtgagagcttctgacatgtgtcaaaaaaaaataaaaaaaaaccgatgattgtcttgcctttgtgtctggctcgaatgcagtaatttcttcagcagctcttcaatatactcaaaagttaatgaaagtattctgtttcacggctctcaaactaaaattttctcaggtacaaaataggctatcttggttccgtttacatgcttaagctggctttgcattattgtgtcattggtttaattaagagtttctctaagttaagtagatagtaatttgcaaaagctccacactatttatcactttaaccataactataactacaactacaattaatgtcagagaataaacttagggtcgagaacgaacaagtgcagaaaggcgattatgccttggatcatgaattggaaaatgttacaaatgttgttgataccagagatcttggaatgataggcgaaatcattcaaggaataattgctttcttaaactcacctgcctttgcgactatagtacaaattatacaacagatagtagagctgattattggtgccttctctttggtctcatttttaggataccatggattccaagatgaagttgtgaaacaatatattagtaccacgtctttttttgtcgcaacaacacaacacggttcgtccttattcagtaacggaattcatttcatgatattaatccttgacttactttccaatcaggacttgacaagtaccgaaattgattggaaaacaattatcttacaaataattctttggatcattgaaaaattattgaatccagacaatgacgatggaactaatggtagacaaaatgataagttgaggggatcagtttccttaatggctgcctcaatcaaaattgtgtctattattatctgcttgcgttcaattttagggtgactgttgactcctatgatcgtattgatattccatgttctttaaccgattgccatttgttattctttagatcaatgatctttttacggttgacaccaatcttaatcatgttttcgtttctaaccttaagtgaattcaaatctaaaaaagatttatgtggcacttccatacatcttttgtttagtttcccgacggcctcatgtaatttgttttctatttggttgggcagcggtggcttcattactgttgacattcaaatactttataactaaataaaattactgttgtaatcttttctttgtcaaggtttccaagtagggaagtaataagataatgaatatgtaaaccaacattccttggttatctaatttcatctctttatgatctcagatgttgcagttcacgtcaaatccataatttctatacccccagcggtttctaacttggtgacttcaatattatgattctcttcgtttgaatcatcatcaagaagttctattactagatcttcttgaacaggcatatagtttttctgatcatttgagttgcagcatgttttgttatccgctgcccttttatctgccgcgattgctgccatttctctagcattccttcttggtcctgttccaggtgtcgtaccacctagtcttcttcctttacctctttctaatgtctttccaataataatcgaccccatcggtttgctacccaatcttttcccggtgccgagaaagctgtcgtaaagtcccatttgttcaatggtccattgtcttcccgataattgatccagcttttcgtaaaactttcggtcatgaggaccatgtaaattatgggtaagctcatgaagcatggtacccataatagattctatcggtagaaatttatattcgtctaatgggtctctaagccgcaacatgatcttcatgcctttgttcacgttcatacctaaaagtgatcgattccgtggataaaactcaactaattgtcttactttgaacctttcctctttcatcagatacgatacgttatgagcgacccttttcaatatgtttaatgcatcgttttttcctggttttgtttgcaatactgcaatgcttcctacatgcggattcttttgtatcggaggaaccatctgtgcgttgtccgtatataggctgtcattaattttcaatagcgcaacttttttagttagttcatatccataggatattctactgttatcatccgcagtagtatccaatactaaaatccaatttttcctttggtctcttcgtttgatgtgtctccaaatggaggttcttttgaaatgtttaaatacgattcttaaaacaaaaatcgatagtccactatttcaactaaattttttaaaaatacatatcgtacaaaccacattcctttctaatttattctaaagtgtccacacaccctgagatttccaatcgattttaggatccaccaatacaactcaagcttacgtacagttccacagtgatttaattgacctgtgaaacaatatatttattggtaataaactaaattattgtcgttcatcaaaaacatgacagaaagcgcgtcgaatagcacgggatcaaagtacggaagctcagagtcgtccaacttgttgacgaagcctgcattgtatggactatatgatgctgatgtgctcaagagcgaggactcagagatctatgaagaagttaaaaaagcatcaagtggtaaagaattagaaaatggaatagtacaacgtgctaagaaaatccctagttctgtcaatgtggctttagcatgggttgtactatcgatagcaggcatcgcttatcatgaattatcaaagaacttacatgataatcatgaattgcataatgactttacttcccgcccgttattattgggtgccactattgcacaatcattaagttttgggtatttaccaccttggacattttacgccatcgaaggtatacttttcggaagtatcgttccatttgtaaactggatacttggaacctttgatcggcaaccaaccactatttctagtgttttaagatctacaaatgccatgttaggtgtttcttttgggattcgtagaattgaatggtcttccagtttacaagcaagtggtgcatggttcttactcaacattatcctttggttgttctttgacagctcatttactatgctagcatctggtttggctattggtttagtcacttgcgtgacctgctatcaagacattaccgatagcgcacagttgttatatttcattgatttctacttccttggtctactattcttcacaagactaggaaaatttttataccgtcaataaatatatatgtataagttcagcggcaattacctcatgtcacaatatttatacgaacatcttctttcctaaagtttataatactaatcctatacaagtaattgtccgttatttgcaaagcgttaaagtttccattatataaaagcgttacaacagttgatatctaatttatataaaccatttgtaattcaagtatggtaagatcaaataaaacggggcgacatagagaaaccatacgatgtgcatgagacttacgggaatgttgacatctgttccgagactttcctattgatgtgattctcgagtttaataatagaacaactactatttattgggtgaccttggtggtggtggaccacttgatatactgccttgtctatttagcctttgggcgtcgacattgctgggaccgtttgcactactggacattcttcttttgatgatactttctcttaatccgctaggatttgtcaaaggtaaattgttattagcaactggactcgactgcaaatcgtcagatttcacacctgccctacgtaaagcgtagtccccgctatcgaaatattttcgttcttgcaatttgtgttggaataagtctttcttactgggtagttttccatacattttgtatatttttaactcttgtggggaaagctttgacaaatcaacattttctggattagctacaggagcttttggatctacactttcagaatcatgtatatgtgggtgtctatgttcatgcccaaagactgggtgttcttgcttgtcagacattctgttttttcacagatataatttagagtgttttatctttgcttccctaatgtgtattgtggatcaagcttgaaataccagatattcaaatcacgagcaattttttgaagaggccagaattcctagtaatattgaagtcaggctgccaccttttatctaaataatcattctataaaattcctaattcaataaatatgattacaatggatgcaccagttcgcatgatattgaccctatctatctatattcatcattcacatttattctattcttccaaatgctatgtgaaaagtgaggtacatggggagaacgatagggcgggtaacatccacaatggattacaccaatgtttgcatgctaggagtcatatcaagtcattaattgatagcttatcagtgccgttaactgaggaattgataagctctaggcacactttatattcgcagggacgaatgtggaatgtagagttgttgcggtactgaatagccgtatgcgtcgtagaaattttaccattctattaattatcaatacgatgataaaaaagtggaaaagaatctttcaaaatcatgacgatggggagtacgtaaacgtggacgaatatttcgatgtataggtgcaacaaaatccttcgctgctaagtgaatgaatatcctgaattgattattgactaacagttgtgatccattcgtttaaaggatacccttaccagaagtgttcatagggtttttttcctagttcaaccgaaattatttcggcatttccagagattacttggaagagaggttagtttaggactctaacgaaataacaagaaaagagccgtaagttatcactgcttatacgaccaggaaagtggttgttagataaattatttaaactgctactgtactatagaggggataatagagaatactacgaatacaaggcagattctgtgttccagcagtaagaacgacattcgaaattatgagagtaggagctttaaccctttgggtgattaatctaatagtgctgtttaccaatacggctgaagctagggattactccaactacaaagtgtgcagattcaacgatgagtctcaattcagtgttataatctccaagttgaaagacatagcaatgataaaacaggagtacgaattcgatatatgggcaaaatcgaaatcgcatggatttatggatatccggatgcacgatgacattttggaacaattccctagttgcgatattataattgaagatttaaattccgtcatttctgaaacaaaatcggcagttgggggagaaacctccaacgacgccagaacccagagtttttttgatgctgaatctaaaaggccaaaagatatattctttgacgaatatcgtgatttggacacaatttacacatggttagatctcctacagttatccttccctgatcttgttacggtagagtggactggtcagaccttcgaaggcagagatttgaaggcccttcatatctcgacaaataacgtcgagaaaaatcctgataagaagacaattatcattaccggtggggtgcatgctcgtgaatgggttagtgtcagtacggtgtgttacactattttccagttactgacgagatatggtaaatcaaaaactgagaccaggtttttggatcatttggactttttaatcatacctgtattcaatcctgatggttatgtatacacctggacgcatgataggctctggaggaaaaatagacaacagacttattttccacggtgctttggcattgacatcgaccactcttttgattttcaatggactggctctaacgactttccatgttcagagagctacagtggtgaatcaccatttgaggctttagaagcggaatcatgggatgaatatgttaacaaagctaaatctgagtacaatatccacggatatttagatttccactcgtacgcccaagaagtattgtacccatatggttattcgtgtgatgctttgccgagagatttggagaaccttttggagttatcatatggcttatcaaaagctatcagacgcaaatcaggaaagggctatcatgttctttcatcctgcgaagaccgtggttctgatttgcaaccaggcttaggatcaggatcagcattggattatatgtaccatcatagagcttattgggcgttccagttgaagcttagagacactggtaatcacggattcctacttccacccaagtttatagttcctgtgggtgaagagatatatgctgctgttcagtacttctgtgaatttattcttaaccctgacctctaatatcacgaactccgttgactttgtttccttcaattcatgtggtaaagtaaaatgcaagtatatttagctcctacttaataatcaatctgatttattctgtttacgtacttcgagaagttggaaggggtctatagcccgtataaaggaaatcgcacatattaatacgcatgcgagatagaacagtattgaatacatgtcaacaggaattccaagttttatcactgccaagctaacatctacctttactttatcttgtaaaatgggataagaatctgctcttgtttctataaggatgactgctctggtctgtgtgcttaaagtgcctttaaatacggtgccatgaggtatgaattgatgacgaatcgatttaagggaaataggatcaattcctgtccaacaaattttgaccatatagttttcatttttctttagtcctgtcaattccacaaacgtcttagcctcaggttgaaggtgggtagtgatagtcctaaatgttgtattccgtgcattgatataaggcaacttcggtacatatgatgggcttaactctggaaaatcctttggaacatgaaactgatatgtttcagtattaccaagtgccagatgacataatgagaaaaacgaaatgatacgtataaggaaagtagccatcataggtccgagttagtttcagatctagttgcagttaactgagtgtgtgcagtggatttatttttggggacgggttttgctttattattacggacactctttagtatatatacactttaaacttcaaatgctttattgacattttttcagaattatttcatactatatcacaactttaaaactaaaggaagatcacctacaagtcggggtgacgagttctttggtggacttgtgtcatacgttctaagccagatcatcacagttctggaaaattacttaatatactatgagtgatgatgatgaattatatgaacagtttcaatatgagatggagcatggcacaccgcacccaaatgttgttgatccacgagaactagaacaacttttacaacaactggaagatgaacaagaacaagttttcttgcgcagaaatgtacgaccaaggaatgcgccagtacattggccggattttgttgtaagaagaccatatctgcgatttcttttaaggaatctattgatattggaccatatattgatggtcttgtttctcccattttctcttttcaccgttctgaagaccgttattaaccaggtgactttcagcgacaccgatgtcttcactgaagttgtcgattatgttcacaatcgtcaagttgtagatccaacatccagcatagtgtacctttacagaaacggtgccggcctattaggatgctttcacaactcagctgtctatcattctgcacctttttttaaataccttatgagaatctatgaaaatccaaacgttcttcggcaactctacactatctacatcaaatggtatacggtcacagtatatctcggatacggtatcttcgtgagttcttacctctcctttgtcaccttctttttcgtcgtatgtgtgacgcttctattcatcaagaagtttaagggagtggatgttatcatcgctaatatcctacaaacatgcaacttagtattttagtttagacattacatagaataataattttgcattagaaatggtgggaaaaatactacagaaattaaacagttgcctttatttgtggagttaacatgaacaccgacttgtccatgtccttggggaaagctcaacataagcaccacggtgaggagaaggtatcatgcttaatattatatcacgtgactgtatacggtcttgtcttgtcatttccgacaaattcctgattgggtaaaactttcccctgcaaaaatagcgacctttggagttgttaagataaaatgcgcgataataaagatagatcaagctcgaggtataatcgcacggtatggtaacggacaatgctcaacaaattgaaggaaataattaaacatatttgatcgggtttttggtactttgtgatgatcggaaattgacgtatataagtgcttgctgtttagcttcttctcagaaccgctttgaaggaactcattcggttacttctaacaagggtattctcagccacatcaaataaagttcttatagtatcccactttcattattagtacaacagccctgctcaaaattgataacaaacaatgaaggttgcaggatttatattgggtgctttgatacaattcagccttactgaaggacatgtagaacagaatgaaaatgccaatctaacagaaatgtggggcgaggactggcccttttctggaattcaaacctttgcacacttacctcaccacaagtgtttgatcgatatggaaaagaagtttgatataggggtcataggagttccgttcgatacagctgtgagctttagagggggtgctagattcgggccacaggccattcgtaaggcatcccaacgccaaacttcgatgcgcgggttcaatttccgtgcagacatcaatccatatcaagattgggcttctgtggtcgattgcggtgacgttccagtaacaccgatggataattgcttagcgttgaaaatgatgactgcggcatatgagaatcttttgagccatgaatcccagacaagcgacaataatttacctccaaggtttgtcactctgggcggtgaccatagtatcatcttgccagcgctacgtgctctaagaaaaacttacggtcgtcttgctgtcatccatttcgactctcacttagatacctgggcaccttctaagtacccatccttctggcacagtgatacttcggagtttactcacggttcaatgttatggatagctcataacgaaggtttactcactgaaaataacaatatccatgctgggttgagaaccagattaagcggatctagtttcgaagattacgatgatgatgacaaagtcggatttcaccgtatcgaagcagacgaaattatggacggcggtattaagtccattgttgaaaagatcaaatcaaaaattcctagtgatgtcccggtctatataagtgtcgatatcgacgttttagatccatctgcagcaccaggtacaggaactatggaagtcggaggatggatgactagagaattgatccgtattattcgtgaactagaagatctcaacctcgtcggtgcagatattgttgaagtatctccaccattcgatcctactgaaattacatcgttagctggtgctcaaattgcatacgaattgatcacaaacatggtgaagaaaggaccaatagatccagagctgattaagcataatcttgaattatcagataagttgactcaaggacaacaattgttaggtttttcaagcccaacggatgaactaaatgacaaaatccaaaaagaacaatttgttttgcaagcctgaacgataaataacaatgatacttaattaactacagctttccctctataatttaaacgaaattatcacggactttacctttggtttaaaagaagaccatttcattagattgtatataagatgccttccagtagtgacatttttcccttttctgaaattctcaactggtgctctcaatacttaaagtaaataatgaaaaatatcgaatatttagaagaacagagagaatcgatccagacatcaacaaaggcgatttcatctactgctattcaaaccttttcttcagtgaactatagcattccttcccttaatcgttgaaatatgttatttatacggcagctttcagttattcctaaagcgcctgcttttgctaaatttttccataccgcgggactggtccgccaaaagctgtcggaccctaatcacttagcaatactcttgcaaaagaacctcgctcaaagaaacagctctctgtacaatcccgaactagagaccatacgatgcacaatattcgataggcatggaaatatgcagaaaccgtccatcgatctacgaagagatgagctcatacacacacatggactcctaccccgagacttgcgaaaggttgaaaaatcgaggagaaatgacttggttcccagtgttcttgtgcgtgagaatagcattttggttagtatattgaacattagggctttggtaaaatcagacatgttaattcttttcgattcgatgggtataaaattggattcggtttctcaacagaatttcattgcggatttacaactgagattacaaaatagaagcggttttgaggtaccagatgttgtgaataaagatcctttgccttacgagtttagagcagtagagtccatttttatttcggctatatctaaccttaacgcagagctcaaggttcacctgaatgtttcaacgggtattttgcaagacttagaatatagtattactagagataagctacggtatcttttgattcaaaataagaaacttagcgtctttcacaaaaaatctttcttgatgagagaaatgattgaagaactattagagcaagatgatgtcttgtgtgaaatgtacttgactgagaaacaattagggaagcctagagaagagcatgatcatgcagaaattgaaatgcttttagaaacttattacaatcatgtcgatgaaattgttcaaactgtaggaaatacaatgtccaatatcaaaactacagaagaaataatcaatatcattcttgattcaaatagaaatcaattgatgttacttggattgcgtttcagtattggtttactctcgttagccggttctatttttattgcctcaatctacggtatgaacttagagaactttatagaggaaggtaacgttggattccccgtggtatcgacattgggggttattctaatggcatatctgtttgcattctccgtcaaacatttacacaagttggaaaaggttcagttaatgagtcatggaaaaagctctacgctaaaataaaactattcgaataagtgctcctaacgtattgtgtaaatactcaagttagggtagcattggattttccagctcttaaatgttttatgaatgttgtgtatatataatgtgacatataagcatctaatgcaattcgcattagaatacatactactcgactgcttctatctttgttccagcgaaaaacacctggcagaatatgatattaaggtataagcagtagtgaaacggattgaaactgtccgatattctagaatgtttcacgactgtatgttaatatgcagtaccaacctattgttaagtttaacgtatcttcattacccgggagaacgattgtatcacgtgatcaaggtcgtttttgtcctggctcttgaatggggtgcaaaaaatacaattgaagactggaaagaaatactattattacatttgagattgaatcattatagaaatttgataacgggctataaactggttctggttgacaacatccacgtaagcgacgaaacttataagctagtataaaggatcttttattcaagatgtcaaagtcaagttttgagaattatttctcgtttcaaatttttttcatcttcttgagagagtcgttagagatcatcataatcgtttccatcttgttgacaatcgtcaaacaagccttattctcgcatgataccaccgctgaatccgatacagagtcttcaaaaaatgctgccccggttaccattcaagaggaagaagcttcagatttattattgagagttaatgactccgattctccaaatctaggtctagaagttgataaccagcagttatataaaaaactaaaacttcaaatcatttctggaggtttgttaggccttttggcatgtatgtttattggtggtggatttattgtggcattttattatgttggcacggatttgtggtctatgagtgaacattattatgaaggtgttttaagcgttattgcgtctgtcatcatttcagttatgggattgttcttcttaagaatgggtaaacttagagagaagttcagagttaaattggcatccatcatttactcagacaaattacttccgatggaaaatggcgaaagcaaagctaaaagtttcagcgagaaatactcattattcatcctaccatttgttacttctttgagagaagggctagaggctgtcgtcttcattggtggtatcggtatcgatagtccattaacctctattccactatcgatgctttctgctacggcgatctcggcaattttcggtgtattcttcttcaaatactcaaagtcgttttcattgcaaatttgccttgtggtaacaacatgtttcctatatcttattgccggcggattattctccaagggtgtatggcagtttgaacttcagaagtatgttgatgcttgtaacggtcaagatatgagcgaagttggaaacggtccaggttcttatgatatctcgcgttcggtatggcatgttaactgttgtaacggtgaaagggatggattttggatgattttgaccgccatttttggatggactaactcagctacctatggttcagttagcagttatattatgtactggttaattgttatcgctgttataaagctaatgatgctcgaagagaaacatggatatattccatttttgcctgtcagtctacaaagaaggagaatgaacaaaagattatctattattgaaaagtctcttgcactcaaatctcaatcatccacgagtggctggaactcatcttccactaccaaaaacttgcctgatattccgagagcttcatcggatactcacaatagctctagcctcctgttagattctaattcgcctgctcaaggttatcagtgatgaaatagttagctattattcttcaaagttgcatgtaaacgaatcattttcttgcgtacgcagttgctccatttggaaaagttacttaagagaaatactatatactatttagaaattgctgttgtaatataacacattacgttggattataacaagtattgactgtttttaaaggtgacggcatgtcaatgtgggctgctgcatgattacttacatatttctttttggcatattctgtcgtttgtttgaatacaatgttcccttttgtacttaaattcgaaaagtccttcaattcggccaaaaaaaaatgagcaaaaaataaagatatgatcaccaaaatctggggtagcgggacagtatatattacaataaacaccgaaagcggttcacttgtttctaacttcagcttcactcagtgaaaacccgatgtacatgccgctgttatacaaaatcaaagatttcacttcataactataatatctgtgcacacagcaggtttaatgtctcactcagtgtgtattgcctgtgactttgacaaagggtggatttctttgtttctgggatcaatatatattctaccacaacatgggaatctaacactctaagtaacatttcacccagttgagattcttacctagtttgaactcagcatcaaattgcagtaacgggagcctatcacctcttcgtaaacgctttttttccggtcattattcgtggatgtatcatagacgtttatatcaaaatgatgacagaatttgcaacgtaaaacgattcctcttcagtatgggatatttaattcaatcatcaattcatttgttattataaggctattgtacaattgggatctttttttgattttgtgtatcattcaccaagtttgttggtatttgttcgtggacgctgacaccttgtacaggcaatcctaatatagtcatttggttatggtaaacgttacagattacgaaactcctaataagagacaaaaggataattcaggattgaaaaagaatctgattctaaatgccttcttgatgagctctcctggtaacgaagtgattaactcgtggagagagtaaggtaatcagagctctcattctgctgaagatccacagtattggatgaaattggcaaaattgctggaagatgggggggttactaagttttctttgccgatgttttaggaccctatgatgtttataatggaccaggaaactttaggcctgtcgccaaagctggctctcgatggccattaccagatctaagttattatattctattaaaggtcgcagtggccaggacgttggcatttggtattactatatcgacaattagcgaacaaccgtatcatttggcaagcagtttcggtactttggacttaattacaaagggccgcatcggatagaatattgtgacatcttctcttgacagcgcctcaaagaatcttttgaacggtcagaactttccgggcaagacttaaaggtatgaaagagctgatgaatattaatgttatttacaaattgttttaagctccgggagagatggtgctgtaaaggctgataaggaaagaggcatatatacagaccccgatgggttgagaaatataagtcatcaaggtaaaaatttcattgttccgggtcctggtgttacacagccaagccagtaaaaactaccagctcttatacaggccagattattcgccgaagggtaaagaattagcggcaagcaacgtagaaattgtctttctttcaaatccttcaaaagaatccctgaggaaagctatttgtttcaacgaacagtacgcagaacatacatttaacagagatccttcgaagattaaattcattgttcaaataattatcgttattggagacactatcaaggatgctgaagaacaagaagctcgtattagactattggcagaagatgaagcagccagagtgatgttttcgggctggggcggtgttggtcttggcgcttatcctgatgataaaccgttggacgatttagataatgcttctgtagtgtctttgatccaggtctggaaggaagcttatccatataataaaaggtggacaacaaatgattgttgttccctggcgttgtaggagcatttctaaggcgccaattattgaactaatgctaaataagaagctgaagctgagagaataccaaacatgatgaatatccagtccaacaatgatgttatcaattttataacgattgtcggatctggcgcagtcttcttggtaccataaaaggcatcgcagacaaaatagacaaatatgtttcttattcagatgttgctggatttaattttgcttacacatcagcaacaagagctatgaacaaatatctgctaagtttataccagaattgagaatgcgtggtttatcacttggttgtgaagcatagaaggaactaattcaacagcaaccattcttcagatatcagctgtttggaaataataatctgtaactcgcatccggcaaatgatttaagatggagtagtgatggatcaaaagaagtcttcgaaaaaatattgccaaaagcacttgaaaggctgactgtaaataattagatatctttaggtcatcatcattcaatcacttggttttattgacttgtttatggtacgttctattacatccactacgagttacactgaaaggaacatgtcaagctcggtggttgtaatttgcataatgatgaagtacccaatagctagcttttctaactgttcgtccgcgacctaccccatgtaatgtaagcagcattgggaaggagttgaaaagacagataatttctagacaaataacttttagaaaactaggttgtttatatttagttgaatattaatatttccaatccagcgtcctaatgaattaagggatctttaaccagatatgctgaacggggggaacgaattgaaattgcctaagaattcagaatcaatttttagatttgaatatatcgttcttgacaccattgaaaattttaatgagtgagtgtctgccgtcccacaatgggtagaggccaataaaaatgagagccaaataaacccagataatagacacaaccgtccatccagcaaagaaagtttttgaaaagatgtaatctctatacaatggtagaggccataccacccatgttatcaataatacgaatactgaagcacctgcagcaattttagtgtaaatattgataattctcacttcttccgcggtgaaaggtgtattcgctgggtttgaagacacttcagtctcgtagaaagcagaatcttctttcaatatttcaactgcattttcggtttttgtttccagttcaacgctaggcttaatacttttactactcttttcttcaattgatggagtagcttctttgaatctattattatcatcaaatgaatcttcttcttcttcttcttcctcgacaatgagtttagccttcttgaaatcagaccagtcaaatttgtaatttttatcaagtaaactaattggaacggttaaaacacctggcaagaataacgcagtaagtccaccatacatacagggtagttgtgagcctgtactggtaattgtgacctcgccataaaatttgtaggcagttcccaaccaaactgcaatgcctgccaagaatccgatcacaggggaaattatggctgcaagtggtgtttgtctatcccagagaatagtcaataccaatggtatgacacctggacaaataatcatagagtagaaataacccatccatgtcatatctactccgacataatgcaacatgaccgtaaagccagctgcgaacaaaccgaagaaaatgaccccaatatgagatactgtgattaattgtgaattgttagcattgggtttgaaataattcctgtaaatgtcaaatgagatgattgaactaacggcaatcatttgagcactaacagtggatgtcacagcaagataaatagctaacaaaagtccacccaaagaactttttccgagcacagccattagagtgtaaggcaaaccgaatccattattgatctcgtacgatgtcatagctcttggataggttgggaaaaaagattctccttctaaaacaatattagacagacctataatggtacctaatggccatacaattgcagggatcaaagctgcggcaattaaatatccgggcactgaagccttgacatttgcactgaaggctttctgccaaaaactggaatccataactgtcaatccaaaatcaccaacacagtggatgatgccaaagaaaatggccccttgagacttaccggttaggaatgaaccctgatagttaccttcgatgtatctgtcaccttcgtgttgtattaccttgtcgtataagccgctaataccgccgatcttgtcactggaaataaccgcagtattaaagtagactaggatgatcaaagcaattaatgagtgcatgtagtctgttaaaaatgtagccttaagccctccaacgacagtatagcacatgacaccgaatggaatcaacatagttgaagcgacaatatgtaagtttccagaaataatcgaaatagcagcagcagaccccaaaatcatggatgaagatgacagtaaattgttgacaagacacataaacatgtagagaatatgtgcacttttaccataacgtaattctacaatttctaaacaagtatgcccatttggaattttcttcttcgcttgaatccctaacaatgccatcagacaaatttgaacagatagccccgcaaagtaccaaaaactactcataaccccgtaagagtaaaccattgtgacaacccataagatttcagttgcccaataccaagaactgaaaacaacagaacctgttaaaccaatacccacatttctgttagcaaccatgaagttctccgtagattgtgaatcttcatgtagatattttcccatcaatttggtagcaacaatgatacccaccgcaaacaaagcgccgacaccaatcaagacaccataccctgatgcttttgtcaataaacttatattgacttcatctgctgaactcatttggaagaatttctttggtttcttagtatcataataaaagagagagttgcaattcaacaaaagcctcttgagtgttgacgcataattgttagatgtgaagcttatataacttcccgataatactagcttcttcacaagaaataaagcgagtgactttgatcttcagttaaatctactaagtgggaatcgaactacccatgccaccaccacagtgactctgctaaattcatctttattctattggtgtaatgagcttcatagataatcagcgttattaccacacgtcggcgcagaaaaagctttactacccattccggtttgccaatacatttatttcttatggtgactttgatggaattaaaagagtgagagctaaagaagacttacaatataatcattgaaaaacaactcatataatagccgtactgtaaatgacattacctagacaagtccggattccgtgagatgaaaccggtaccaagttaaggttatagcttggtgagtggggctcgaacgtgttcccggattttttcttttgatgagtttgtactatgcttaccaaccttattcattctatgattgtctttggcatgagccacaattatcagcaaaatccattgaagagccaaataaggcacagtaacaaaaaacacttcgtattaacagctatcagctgccatcaataatgaaagtaaacatatcttacgtgtctgcctaatcacgcggtaggtaaaggcagtcgaaatgatattttcatgtagaaactattacatcagtacggaataatattaccggaagcacaacaattctcaatagaatcaggtacatgatggagaagtcaatcaatgtggacggcagactcaccccattcatcaaaatgttcttcttagcggaaaccaaacgtagcttgcgaataccggaattcaacatgggggcagagtataacatttcaatttggattttcagcaatttcttatactcaactgagcttgaatgtgtttgaatggagatttgtggtaatataatatcttgatagtattcactggatacctagagaacttagtggaaaggtaataagaaagttcgtgacaatacttcctgaagtcttttttttattgctcctaactgagttgtttttttttcaacttgtaaatgaacaattggcctctgagagacagcggttagtgttcgaatcatatcggctttcaaactgataatgtattcgttaagatttccctccttacacttcttgtaagttgaaaattgtcacatagctacaaagaagtgggtaaatcaatataagagtcaccgtgtctttgaatcagcggatcagaatgtagaatgtatttgaattgatttatcgctcaataataacaccgccttagttctcttgtaccaatgagagccattcttagtacggcagaaacagaccttatatttagttacctttaccattcattgcatgcatttagtgttcggtagtcttttttttgacgttttcagtctttgtaactttcttcttaccaaacatacagcgaatggataataaccatcgcgttgctcctttaattttgcttttaggagtttgaaagtttaaatcagagagggtgaagcatctttatatcaaccgtttgatgttctccggtgtctgatcacaactaggctccgagctatgaaatttaagatgtagataacgcaaaatttcaagtaaagatttcttgcttgtgggtatccgaatttgctcaagttggattggacgatgatgagatttggtagcaggcgctttttttagagtgttagtagtatacatgtcaatagattctatactggcttagagtttgataatgcaattattggatggttgaactgatgctctgtatgcgaacttcagctaattaagtgtattatttaagatgttctacttggcttccgcctgacggataatttaatatagagccacaatagataggttgtcaaatccgaataggaattgaatgaagatgccatttacttatatacttgttacatctgatgttcaaatgctgggtgccgtagcgttgatgttgatcatagtgacttcagaattccttctgtatcgtttccataaagaggcgggctggggataagtacaatgccgtggaacaatacgtcattgttaaacattaaatcgatcctatatcgtctctccattacaactgttgacgaaaacgtaggagtttacaggatattcatttaaaagtttttataagacttgaccataatgaataaaaagctgagaaaatctaagtgatttctgctatggttatcattcctcggaagcattaccggaacattgagtaacatctttgttgtcaatacagtatccataaacgacactattcgtgttaaaaaacagttttccacgtgcagaagttaccgcacctaattgattatggccttgtccaccgccaggattaggattatcagtggctatccagcagctcttctaggcagttgaaccatgccaacagtcgtaaacggacggatcataatcttcctcagcgatcctctatcatgggcaccaattcttaacagatctttgtctgcatcaccccatgcccaaggtagttgtatctcccgtgtaagccctcctgattagtgtaatttaaagttgattctaaacagtcagggttttactctcagtggtattattgtctattaagtctggtttcagtattcaaaggtacggcagtattagactccagagggctatcaaagtatggaatatgaaccgtgtcagtgacagtgtcgtatgcatctacgatcaaaaggtatcatacccatcctaaagtctgttgaaggccaaacaccaatcgccaatagtaaaaactcacgcgagcagctctgctatctttcaccttgatatatgtggaatctcctgctgaaagaactgaattcttcacgttttgcgtctgatgaaatccaaccgttttaggttttcctgtagccgtttgaaagatagtaccaacggtaccagcaagcgtagctggcaagggctcctgctgatatcaagaacccagcaacaactgaacttgcaatccagttccaatgatcatgcttgactagcacataattagacacgccaccggctttctcagcaatgttaacgtcattcgaatggcctgcttgtctctgagcctccctatataaatgataacaactgatcaatccaaagaagaaaacaaatagaatgaggaattgaatgagaatggttttccatgacttcgtcgaaggagcttcacgaactaggttttcagagtcatcttgaatcatggtcagtttgcaggaatcacgcaacctatttgctggtaagaaataatacgtatctcatagttctataagcacactttcataatgaatgtcgtaggaaaccttttgtctcgttgattttaactttctcatgatatttttgtagtacatttcccaacttggaagatgtaaaataaatatgtttaattgagagcatttttttagtttttgagtaggaaatgaagattagagatggaaaagtgaaaggaaggaaaagatggagggaagaaagagaggacaaaggcaaggtgtagggaggaataattgggtgtaagcagtagtataatagtagtatagcggcagtatacatcgaataggaagttcgtagttcatagttcaagccatgtacaagggatatttgttactagagtgtttgcggtggtcacgtgtatggagaagcgtattctattcacagggggagaggtcctctatgtgagggatgatggacagagagtatgaaaatgaaaaatacttcctctgtttatcacgtgaataagttcaggggatgattcacgagagattgagcatttactcctggtgaaaaatgaaaatgggatggttgaagtagtcacgtgtattcaggaaaagggcaaccatttacaaggatccccttgtggtagcaggaatagtgcaatgaaaaatgaaaaaaatgaaacagatttgaaggaaaaggggtaacccggacaaaaacaggattgaagtatggattgagaatggatgggatgggacaggagagaacgactgaggttcgttccgtatgaaacgatgtaggaaggtgggtgaaaaggagttgcgtgggtagaaaggagtgataagaggcacgtgatgtacagtaaagcagggtaagtattagggtcaagaagtgaagtaattttaaatgaagtttggtggcaagagaagcagaaatgggagatgtggaatgggtattgtttgtgcgggtaactgtagtatgtcagacaggatcattgaaggaacatggagggagaggtgtagtttaagtgcgggtaagtagtaattgtgaaaaagatacaatctgatattcagagggagagagagggaaagaaaggtagaatgagaagggatgaaaaatgaaagtgaagagaagcaggtgaagagaagcaggtgatgggaagcgggagatgggaagcgggagatgggaagcacgtgatttataataaagcagggtaactaaggaagtgatgaagtgaagtaatttgaaatgaagtttcatggcaagaggagcaaaagttggaagaagttgaaaatgggtgataattgtgcgggtaacgtgtgtatcctatgcaaggaccaggcccagcaggaccaagcattggccatggcaagaaggtggattgacaaagaaaatgtgatggaagtgcgggtaaggggaaatggtgaaaaacagtcaagaatactgccaaaaaaagtataaattgaggaatgagaatggatgagagtgaaaggagaaagcgaaagaggagaagaggaaaaagaaattaaagtaaaaaacaaagaagcaaaattaccgaaagaggaaatccgtttcgagtgattagaaaagagaaaatgagaaaatgagaaaatgagaaaaagaaaattaccagaagaggaaatccgtctagagtgattaaaaaagagaaaatgagaaaatgagaaaatgaaaaaatgaaaaaatgaaaaaaatgaaaaaaatgaaaaaaaattgaaaaaaataaaagtaaaattacccagaaagggaggagcggggtgtacggatttgattaggtatgtggtgtacggatttgattaggtatgtggtgtacggatttgattaggtatgtggtgtacggatttgattaggtatgtggtgtacggatttgattaggtatgtggtgtacggatttgattaggtatgtggtgtacggatttgattaggtatgtggtgtacggatttgattaggtatgtggtgtacggatttgattaggtatgtggtgtacggatttgattaggtatgtggtgtacggatttgattaggtatgtggtgtacggatttgattaggtatgtggtgtacggatttgattaggtatgtggtgtacggatttgattaggtatgtggtgtacggatttgattaggtatgtggtgtacggatttgattaggtatgtggtgtacggatttgattaggtatgtggtgtacggatttgattaggtatgtggtgtacggatttgattaggtatgtggtgtacatatacttttcatgtggtatcttgcccaacttaatgtaaatactccattttgtataggtttagatgaataagtagattctttaattttctttatcagcataaaatcagtgtcccatatcttatatgcctcttctgactcaaaatctatatcatcttctgattttataaaatactcaaaatttacccatttttgtgcgaatttgccccataaactgttcataataattttgataacattttccagcacactgc

SEQ ID NO: 21 - DNA, 1668 bp, Kluyveromyces lactis
atgaccaaaacagatgaacctaaaaagccgaatttcttaattattgtcgccgatgatttagggtttacagatgtgtcgagttttggaggtgaaatacaaacgccaaaccttgataaattgtctaaaggtggtttcagattcactggttttcatactgcatcggcatgttcgccaactagatcgatgttgttgagcggtactgacaaccatttggcaggtttgggccaaatggctgaatatgccaggcaatttccagaaaagttcaaggataaacctggttatgaaggttatttgaactataaggttgctgcattgcctgaaatattatccccagaatattacacgctgatttcggggaaatggcaccttggattagaaaagccatattggccaagtgaccgtggattccaaaaacgttttaccttgctgcctggtgcaggaaaccatttcaaatgcaatttggatagcaagtttcttctcccatggatttatcaggaaaatggcgaaagggtagaccataacaagtttccagaaaacttttattccaccacttacttcacagataaatttttggaatatttgaaggatgatgaagaaagaaaaggtcgcccattctttggccagttgacctacacagctccacattggccattacaggctcctgctgagactatcgcaaaatacaaaggtaagtataatggtggtccccaggcattgagaagacaaagattggaaagagctagagatcttggtattgttccagctgatgttgttgctcatttagtagaaactcaaagagaaaagacttgggatgaattagatgataagggaaaggcctacgaaagccgtattatggaaatttatgccgcgatggttgatgaattagaccaaaatatcggtagagttatcgatcatttgaaggaaaccgatgaattcgacaacactgtcatcatgtttatgtcagacaatggtgctgaaggtatgttaatggaggcattgccgtttggaggttccactttcaaggaaagaatatcgtccgattataacaacgattttgacaacattggtaaaacaaacagttttgtttattatggtgatttgtgggctcaagcagctactgctccaaattatatgtataaaatgtgggcaactgaaggtggtatcaattgtcctcttatcttacatgctccacaattaacaggactatgggaaccaggtcaaatcatcgaccagtttacaacagttatggacattttacctagtgttttagaattggctaacgttcctcatccaggtacctcatttgaaggtcgcaaggtgcacgaaccaagaggtttgtcatggattcctttcttaaaaaaagaatccgaaagaatatatgacgataccagggtcactggttgggaattatttggtcaacgtgccattcgccaaggtccttataaaggtgtgtatattccacccccatttggccctggtcactggttacttttcaacattgatgaagaccctggtgagactacagatttgtccaaagagcacccagatatcttagaaaagataattgatcactggtctgtgtataaagcagaaactggactcatcgaattagaagactctgtcttcgataatgcccattatgtgaaaagagtacttgatgactattaa

SEQ ID NO: 22 - protein, 555 aa, Kluyveromyces lactis
MTKTDEPKKPNFLIIVADDLGFTDVSSFGGEIQTPNLDKLSKGGFRFTGFHTASACSPTRSMLLSGTDNHLAGLGQMAEYARQFPEKFKDKPGYEGYLNYKVAALPEILSPEYYTLISGKWHLGLEKPYWPSDRGFQKRFTLLPGAGNHFKCNLDSKFLLPWIYQENGERVDHNKFPENFYSTTYFTDKFLEYLKDDEERKGRPFFGQLTYTAPHWPLQAPAETIAKYKGKYNGGPQALRRQRLERARDLGIVPADVVAHLVETQREKTWDELDDKGKAYESRIMEIYAAMVDELDQNIGRVIDHLKETDEFDNTVIMFMSDNGAEGMLMEALPFGGSTFKERISSDYNNDFDNIGKTNSFVYYGDLWAQAATAPNYMYKMWATEGGINCPLILHAPQLTGLWEPGQIIDQFTTVMDILPSVLELANVPHPGTSFEGRKVHEPRGLSWIPFLKKESERIYDDTRVTGWELFGQRAIRQGPYKGVYIPPPFGPGHWLLFNIDEDPGETTDLSKEHPDILEKIIDHWSVYKAETGLIELEDSVFDNAHYVKRVLDDY
